(19) United States
(12) Patent Application Publication
(10) Pub. No.: US 2025/0325718 A1
(43) Pub. Date: Oct. 23, 2025

(54) IMMUNOCONJUGATES COMPRISING KALLIKREIN RELATED PEPTIDASE 2 ANTIGEN BINDING DOMAINS AND THEIR USES

(71) Applicant: Janssen Biotech, Inc., Horsham, PA (US)

(72) Inventors: Fei SHEN, Collegeville, PA (US); Theresa MCDEVITT, Warminster, PA (US); Shalom GOLDBERG, Merion Station, PA (US); Kristen WILEY, Trappe, PA (US); Ryan M. SMITH, Phoenixville, PA (US); Sathyadevi VENKATARAMANI, Blue Bell, PA (US)

(21) Appl. No.: 18/262,980

(22) PCT Filed: Jan. 26, 2022
(86) PCT No.: PCT/IB2022/050673

§ 371 Date: Jul. 26, 2023

Related U.S. Application Data
(60) Provisional application No. 63/142,147, filed on Jan. 27, 2021.
(60) Provisional application No. 63/144,586, filed on Feb. 2, 2021.

(51) Int. Cl. A61K 51/10; A61K 47/68; C07K 16/40

(52) U.S. Cl. CPC A61K 51/1075; A61K 47/68031; A61K 47/6871; A61K 51/1093; C07K 16/40; C07K 2317/24; C07K 2317/55; C07K 2317/565; C07K 2317/622; C07K 2317/92; C07K 2317/94

(57) ABSTRACT

Provided herein are immunoconjugates, such as radioimmunoconjugates, comprising a therapeutic moiety conjugated to an antibody or antigen binding domain with binding specificity for hK2. In certain embodiments, the hK2-specific immunoconjugate demonstrates a short half-life. Also provided herein are methods of using the immunoconjugates for selectively targeting cancer cells and for treating diseases such as prostate cancer.

### CROSS-REFERENCE TO RELATED APPLICATIONS

[0001] This application is the National Stage Application of International Patent Application No. PCT/IB2022/050673, filed on Jan. 26, 2022, which claims the benefit of priority of U.S. Provisional Application No. 63/142,147, filed on Jan. 27, 2021, and U.S. Provisional Application No. 63/144,586, filed on Feb. 2, 2021, the contents of which are incorporated by reference herein, in their entireties and for all purposes.

### SEQUENCE LISTING

[0002] The instant application contains a Sequence Listing which has been submitted electronically in ASCII format and is hereby incorporated by reference in its entirety. Said ASCII copy, created on Aug. 6, 2024, is named 103693_003986_Sequence_Listing_2.txt and is 772,485 bytes in size.

### TECHNICAL FIELD

[0003] The invention provides immunoconjugates, such as radioconjugates, comprising antigen binding domains that bind kallikrein related peptidase 2 (hK2) protein, and methods of making and using them.

### BACKGROUND OF THE INVENTION

[0004] Prostate cancer is the second most frequently diagnosed cancer and the sixth leading cause of cancer death in males, accounting for about 14% of the total new cancer cases and about 6% of the total cancer deaths in males worldwide. The course of prostate cancer from diagnosis to death is best categorized as a series of clinical stages based on the extent of disease, hormonal status, and absence or presence of detectable metastases: localized disease, rising levels of prostate-specific antigen (PSA) after radiation therapy or surgery with no detectable metastases, and clinical metastases in the non-castrate or castrate stage. Although surgery, radiation, or a combination of both can be curative for patients with localized disease, a significant proportion of these patients have recurrent disease as evidenced by a rising level of PSA, which can lead to the development of metastases, especially in the high-risk group—a transition to the lethal stage of the disease.

[0005] Androgen depletion therapy (ADT) is the standard treatment with a generally predictable outcome: decline in PSA, a period of stability in which the tumor does not proliferate, followed by rising PSA and regrowth as castration-resistant disease. Historically, ADT has been the standard of care for patients with metastatic prostate cancer.

[0006] Kallikrein related peptidase 2 (hK2, HK2) is a trypsin-like enzyme with androgen receptor (AR)-driven expression specific to prostate tissue and prostate cancer. hK2 expression is restricted to the prostate and prostate cancer tissue, however it has recently been demonstrated that hK2 was detectable in breast cancer lines and primary patient samples after appropriate activation of the AR-pathway by steroid hormones (U.S. Pat. Publ. No. 2018/0326102). Retrograde release of catalytically inactive hK2 into the blood occurs when the highly structured organization of the prostate is compromised upon hypertrophy or malignant transformation.

[0007] There remains a need for next generation hK2-targeted therapies for therapeutic and diagnostic purposes.

### BRIEF SUMMARY OF THE INVENTION

[0008] Embodiments of the present invention relate to an anti-hk2 radioconjugate comprising an antigen binding domain conjugated with a chelator that binds radiometals for therapeutic use or imaging. According to particular embodiments, the anti-hK2 radioconjugate comprising an antigen binding domain has a shorter half-life compared to an anti-hK2 radioconjugate comprising a full-length antibody.

[0009] In many cases the circulating half-life of immunoglobulin G (IgG) in humans is approximately 10-21 days. The Fc domain in an intact IgG is capable of binding to the neonatal Fc receptor (FcRn), leading to antibody recycling and minimal endosomal degradation. FcRn plays a key role in serum IgG homeostasis as well as in placental transfer of IgG molecules from mother to fetus. Following pinocytosis, the acidic environment of the early endosome allows for binding of IgG (as well as albumin) to FcRn, which provides protection from degradation and facilitates trafficking of IgG back to the extracellular environment, where the molecules dissociate back into circulation upon exposure to physiological pH.

[0010] The circulating half-life of an antigen binding domain, such as a Fab, tends to be much shorter than that of an IgG. As the Fab fragment lacks the Fc domain, the FcR₁₁ mediated enhanced half-life mechanism is lacking, thus the Fab alone has a shorter half-life (for example, less than 24 hours, or less than 12 hours, and in some cases about 2-3 hours).

[0011] An embodiment of the present invention provides immunoconjugate comprising a therapeutic moiety conjugated to an antigen binding domain with binding specificity for kallikrein related peptidase 2 (hK2).

[0012] According to certain embodiments, the therapeutic moiety is a cytotoxic agent.

[0013] According to certain embodiments, the therapeutic moiety is an imaging agent.

[0014] According to certain embodiments, the therapeutic moiety comprises a radiometal. Non-limiting examples of suitable radiometals include²²⁵Ac, ¹⁷⁷Lu, ³²P, ⁴⁷Sc, ⁶⁷Cu, ⁷⁷As, ⁸⁹Sr, ⁹⁰Y, ⁹⁹Tc, ¹⁰⁵Rh, ¹⁰⁹Pd, ¹¹¹Ag, ¹³¹I, ¹⁴⁹Tb, ¹⁵²Tb, ¹⁵⁵Tb, ¹⁵³Sm, ¹⁵⁹Gd, ¹⁶⁵Dy, ¹⁶⁶Ho, ¹⁶⁹Er, ¹⁸⁶Re, ¹⁸⁸Re, ¹⁹⁴Ir, ¹⁹⁸Au, ¹⁹⁹Au, ²¹¹At, ²¹²Pb, ²¹²Bi, ²¹³Bi, ²²³Ra, ²⁵⁵Fm, ²²⁷Th, ¹⁷⁷Lu, ⁶²Cu, ⁶⁴Cu, ⁶⁷Ga, ⁶⁸Ga, ⁸⁶Y, ⁸⁹Zr, and ¹¹¹In.

[0015] According to certain embodiments, the therapeutic moiety is a cytotoxic agent comprising ²²⁵Ac.

[0016] According to certain embodiments, the therapeutic moiety is an imaging agent comprising ¹¹¹In.

[0017] According to certain embodiments, the therapeutic moiety comprises a radiometal complex, wherein the radiometal complex comprises the radiometal bound to a chelator, and wherein the chelator is conjugated to the antigen binding domain with binding specificity for kallikrein related peptidase 2 (hK2).

[0018] According to certain embodiments, the chelator is 1,4,7,10-tetraazacyclododecane-1,4,7,10, tetraacetic acid (DOTA), S-2-(4-isothiocyanatobenzyl)-1,4,7-triazacyclononane-1,4,7-triacetic acid (NOTA), 1,4,8,11-tetraazacyclodocedan-1,4,8,11-tetraacetic acid (TETA), 3,6,9,15-tetraazabicyclo[9.3.1]-pentadeca-1 (15),11,13-triene-4-(S)-(4-isothiocyanatobenzyl)-3,6,9-triacetic acid (PCTA), 5-S-(4-aminobenzyl)-1-oxa-4,7,10-triazacyclododecane-4,7,10-tris(acetic acid) (DO3A), or a derivative thereof.

[0019] According to certain embodiments, the chelator is DOTA.

[0020] According to certain embodiments, the chelator is H₂bp18c6 or a H₂bp18c6 derivative.

[0021] According to certain embodiments, the radiometal complex is a radiocomplex of Formula (I-m), or Formula (II-m), or Formula (III-m) as described herein, wherein R₁₁ comprises the antigen binding domain with binding specificity for kallikrein related peptidase 2 (hK2) and M is the radiometal.

[0022] According to certain embodiments, the radiometal complex is a radiometal complex of Formula (IV-m), or Formula (V-m), or Formula (VI-m) as described herein, wherein R₄ comprises the antigen binding domain with binding specificity for kallikrein related peptidase 2 (hK2) and M⁺ is the radiometal.

[0023] According to certain embodiments, the therapeutic moiety is an auristatin derivative, such as MMAE (monomethyl auristatin E) or MMAF (monomethyl auristatin F).

[0024] According to certain embodiments, the antigen binding domain that binds hK2 is a scFv, a (scFv)₂, a Fv, a Fab, a F(ab′)₂, a Fd, a dAb or a VHH.

[0025] According to certain embodiments, the antigen binding domain with binding specificity for hK2 is a Fab.

[0026] According to certain embodiments, the antigen binding domain comprises the HCDR1, the HCDR2, the HCDR3, the LCDR1, the LCDR2 and the LCDR3 of SEQ ID NO: 170 (SYYWS), SEQ ID NO: 171 (YIYYSGSTNYNPSLKS), SEQ ID NO: 172 (TTIFGVVTPNFYYGMDV), SEQ ID NO: 173 (RASQGISSYLA), SEQ ID NO: 174 (AASTLQS) and SEQ ID NO: 175 (QQLNSYPLT), respectively.

[0027] According to certain embodiments, the antigen binding domain that binds hK2 comprises a VH which is at least 80% (e.g. at least 85%, at least 90%, at least 95%, at least 99% or 100%) identical to the VH of SEQ ID NO: 162 (QVQLQESGPGLVKPSETLSLTCTVSGGSISSYYWSWIRQPPGKGLEWIGYIYYSGSTNYNPSL KSRVTISVDTSKNQFSLKLSSVTAADTAVYYCAGTTIFGVVTPNFYYGMDVWGQGTTVTVS S), and a VL which is at least 80% (e.g. at least 85%, at least 90%, at least 95%, at least 99% or 100%) identical to the VL of SEQ ID NO: 163 (DIQMTQSPSFLSASVGDRVTITCRASQGISSYLAWYQQKPGKAPKFLIYAASTLQSGVPSRFS GSGSGTEFTLTISSLQPEDFATYYCQQLNSYPLTFGGGTKVEIK).

[0028] According to certain embodiments, the antigen binding domain that binds hK2 comprises the VH of SEQ ID NO: 162 and the VL of SEQ ID NO: 163.

[0029] According to certain embodiments, the antigen binding domain is a Fab that comprises: A) a HCDR1, a HCDR2, a HCDR3, a LCDR1, a LCDR2 and a LCDR3 of SEQ ID NOs: 170, 171, 172, 173, 174 and 175, respectively; and/or B) a VH of SEQ ID NO: 162 and a VL of SEQ ID NO: 163.

[0030] According to certain embodiments, the immunoconjugate is a short half-life immunoconjugate.

[0031] According to certain embodiments, a method of treating an hK2-expressing cancer in a subject, comprises administering to the subject a therapeutically effective amount of the immunoconjugate according to any of the foregoing embodiments.

[0032] According to certain embodiments, a method of reducing the amount of hK2-expressing tumor cells in a subject, comprises administering to the subject a therapeutically effective amount of the immunoconjugate according to any of the foregoing embodiments.

[0033] According to certain embodiments, a method of treating prostate cancer in a subject comprises administering to the subject a therapeutically effective amount of the immunoconjugate according to any of the foregoing embodiments.

[0034] According to certain embodiments, the prostate cancer is relapsed, refractory, malignant or castration resistant prostate cancer, or any combination thereof.

[0035] According to certain embodiments, the prostate cancer is metastatic castration-resistant prostate cancer.

[0036] According to certain embodiments, a method of detecting the presence of prostate cancer in a subject, comprising administering the immunoconjugate according to any of the foregoing embodiments to a subject suspected to have prostate cancer and visualizing the biological structures to which the conjugate is bound (e.g., by computerized tomography or positron emission tomography), thereby detecting the presence of prostate cancer, wherein the immunoconjugate preferably comprises an imaging agent, such as 111-In or 64-Cu. According to certain embodiments, the method comprises conjugating the therapeutic moiety to the antigen binding domain with binding specificity for kallikrein related peptidase 2 (hK2).

[0037] According to certain embodiments, a method of making a radioimmunoconjugate as described herein comprises binding a radiometal to a chelator that is conjugated to an antigen binding domain with binding specificity for kallikrein related peptidase 2 (hK2).

[0038] According to certain embodiments, a short half-life radioimmunoconjugate comprises a radiometal complex, wherein the radiometal complex comprises ²²⁵Ac bound to a chelator, and wherein the chelator is conjugated to a Fab with binding specificity for hK2, said Fab comprising: a HCDR1, a HCDR2, a HCDR3, a LCDR1, a LCDR2 and a LCDR3 of SEQ ID NOs: 170, 171, 172, 173, 174 and 175, respectively. According to certain embodiments, said Fab comprises a VH of SEQ ID NO: 162 and a VL of SEQ ID NO: 163.

### DETAILED DESCRIPTION OF THE DRAWINGS

[0039] The foregoing summary, as well as the following detailed description of the invention, will be better understood when read in conjunction with the appended drawings. It should be understood that the invention is not limited to the precise embodiments shown in the drawings.

[0040] In the drawings;

[0041] FIG. 1 shows cell binding and internalization of an immunoconjugate of the present invention, comprising the KL2B30 Fab (identified as KL2B997) conjugated to MMAF (monomethyl auristatin F), in hK2-expressing VCaP cells.

[0042] FIG. 2 shows amino acid sequences (heavy chain and light chain sequences) of KL2B997 and KL2B1251. KL2B997 has a His-tag and a sortase tag (underlined in FIG. 2) on the heavy chain, and KL2B1251 is tagless.

### DETAILED DESCRIPTION OF THE INVENTION

[0043] Various publications, articles and patents are cited or described in the background and throughout the specification; each of these references is herein incorporated by reference in its entirety. Discussion of documents, acts, materials, devices, articles or the like which has been included in the present specification is for the purpose of providing context for the invention. Such discussion is not an admission that any or all of these matters form part of the prior art with respect to any inventions disclosed or claimed.

[0044] Unless defined otherwise, all technical and scientific terms used herein have the same meaning commonly understood to one of ordinary skill in the art to which this invention pertains. Otherwise, certain terms cited herein have the meanings as set in the specification. All patents, published patent applications and publications cited herein are incorporated by reference as if set forth fully herein

[0045] As used herein, the conjunctive term “and/or” between multiple recited elements is understood as encompassing both individual and combined options. For instance, where two elements are conjoined by “and/or”, a first option refers to the applicability of the first element without the second. A second option refers to the applicability of the second element without the first. A third option refers to the applicability of the first and second elements together. Any one of these options is understood to fall within the meaning, and therefore satisfy the requirement of the term “and/or” as used herein. Concurrent applicability of more than one of the options is also understood to fall within the meaning, and therefore satisfy the requirement of the term “and/or.”

[0046] In an attempt to help the reader of the application, the description has been separated into various paragraphs or sections, or is directed to various embodiments of the application. These separations should not be considered as disconnecting the substance of a paragraph or section or embodiments from the substance of another paragraph or section or embodiments. To the contrary, one skilled in the art will understand that the description has broad application and encompasses all the combinations of the various sections, paragraphs and sentences that can be contemplated. The discussion of any embodiment is meant only to be exemplary and is not intended to suggest that the scope of the disclosure, including the claims, is limited to these examples.

[0047] As used herein, the use of a numerical range expressly includes all possible subranges, all individual numerical values within that range, including integers within such ranges and fractions of the values unless the context clearly indicates otherwise.

[0048] When a list is presented, unless stated otherwise, it is to be understood that each individual element of that list, and every combination of that list, is a separate embodiment. For example, a list of embodiments presented as “A, B, or C” is to be interpreted as including the embodiments, “A,” “B,” “C,” “A or B,” “A or C,” “B or C,” or “A, B, or C.”

[0049] As used in this specification and the appended claims, the singular forms “a,” “an,” and “the” include plural referents unless the content clearly dictates otherwise. Thus, for example, reference to “a cell” includes a combination of two or more cells, and the like.

[0050] The transitional terms “comprising,” “consisting essentially of,” and “consisting of” are intended to connote their generally accepted meanings in the patent vernacular; that is, (i) “comprising,” which is synonymous with “including,” “containing,” or “characterized by,” is inclusive or open-ended and does not exclude additional, unrecited elements or method steps; (ii) “consisting of” excludes any element, step, or ingredient not specified in the claim; and (iii) “consisting essentially of” limits the scope of a claim to the specified materials or steps “and those that do not materially affect the basic and novel characteristic(s)” of the claimed invention. Embodiments described in terms of the phrase “comprising” (or its equivalents) also provide as embodiments those independently described in terms of “consisting of” and “consisting essentially of.”

[0051] “About” means within an acceptable error range for the particular value as determined by one of ordinary skill in the art, which will depend in part on how the value is measured or determined, i.e., the limitations of the measurement system.

[0052] “Antibody-dependent cellular cytotoxicity”, “antibody-dependent cell-mediated cytotoxicity” or “ADCC” refers to the mechanism of inducing cell death that depends upon the interaction of antibody-coated target cells with effector cells possessing lytic activity, such as natural killer cells (NK), monocytes, macrophages and neutrophils via Fc gamma receptors (FcγR) expressed on effector cells.

[0053] “Antibody-dependent cellular phagocytosis” or “ADCP” refers to the mechanism of elimination of antibody-coated target cells by internalization by phagocytic cells, such as macrophages or dendritic cells.

[0054] “Antigen” refers to any molecule (e.g., protein, peptide, polysaccharide, glycoprotein, glycolipid, nucleic acid, portions thereof, or combinations thereof) capable of being bound by an antigen binding domain or a T-cell receptor capable of mediating an immune response.

[0055] Exemplary immune responses include antibody production and activation of immune cells, such as T cells, B cells or NK cells. Antigens may be expressed by genes, synthetized, or purified from biological samples such as a tissue sample, a tumor sample, a cell or a fluid with other biological components, organisms, subunits of proteins/antigens, killed or inactivated whole cells or lysates.

[0056] “Antigen binding fragment” or “antigen binding domain” refers to a portion of an isolated protein that binds an antigen. Antigen binding fragments may be synthetic, enzymatically obtainable or genetically engineered polypeptides and include portions of an immunoglobulin that bind an antigen, such as the VH, the VL, the VH and the VL, Fab, Fab′, F(ab′)₂, Fd and Fv fragments, domain antibodies (dAb) consisting of one VH domain or one VL domain, shark variable IgNAR domains, camelized VH domains, VHH domains, minimal recognition units consisting of the amino acid residues that mimic the CDR₅ of an antibody, such as FR3-CDR3-FR4 portions, the HCDR1, the HCDR2 and/or the HCDR3 and the LCDR1, the LCDR2 and/or the LCDR3, alternative scaffolds that bind an antigen, and multispecific proteins comprising the antigen binding fragments. Antigen binding fragments (such as VH and VL) may be linked together via a synthetic linker to form various types of single antibody designs where the VH/VL domains may pair intramolecularly, or intermolecularly in those cases when the VH and VL domains are expressed by separate single chains, to form a monovalent antigen binding domain, such as single chain Fv (scFv) or diabody. As used herein, an “antigen binding fragment” or “antigen binding domain” does not refer to a full-length antibody having an Fc region.

[0057] “Antibodies” is meant in a broad sense and includes immunoglobulin molecules including monoclonal antibodies including murine, human, humanized and chimeric monoclonal antibodies, antigen binding fragments, multispecific antibodies, such as bispecific, trispecific, tetraspecific, dimeric, tetrameric or multimeric antibodies, single chain antibodies, domain antibodies and any other modified configuration of the immunoglobulin molecule that comprises an antigen binding site of the required specificity. “Full length antibodies” are comprised of two heavy chains (HC) and two light chains (LC) inter-connected by disulfide bonds as well as multimers thereof (e.g. IgM). Each heavy chain is comprised of a heavy chain variable region (VH) and a heavy chain constant region (comprised of domains CH1, hinge, CH2 and CH3).

[0058] Each light chain is comprised of a light chain variable region (VL) and a light chain constant region (CL). The VH and the VL regions may be further subdivided into regions of hypervariability, termed complementarity determining regions (CDR), interspersed with framework regions (FR). Each VH and VL is composed of three CDR₅ and four FR segments, arranged from amino-to-carboxy-terminus in the following order: FR1, CDR1, FR2, CDR2, FR3, CDR3 and FR4. Immunoglobulins may be assigned to five major classes, IgA, IgD, IgE, IgG and IgM, depending on the heavy chain constant domain amino acid sequence. IgA and IgG are further sub-classified as the isotypes IgA1, IgA2, IgG1, IgG2, IgG3 and IgG4. Antibody light chains of any vertebrate species may be assigned to one of two clearly distinct types, namely kappa (κ) and lambda (λ), based on the amino acid sequences of their constant domains.

[0059] “Cancer” refers to a broad group of various diseases characterized by the uncontrolled growth of abnormal cells in the body. Unregulated cell division and growth results in the formation of malignant tumors that invade neighboring tissues and may also metastasize to distant parts of the body through the lymphatic system or bloodstream. A “cancer” or “cancer tissue” can include a tumor.

[0060] “Complementarity determining regions” (CDR) are antibody regions that bind an antigen. There are three CDR₅ in the VH (HCDR1, HCDR2, HCDR3) and three CDR₅ in the VL (LCDR1, LCDR2, LCDR3). CDR₅ may be defined using various delineations such as Kabat (Wu et al. (1970) J Exp Med 132:211-50; Kabat et al., Sequences of Proteins of Immunological Interest, 5th Ed. Public Health Service, National Institutes of Health, Bethesda, Md., 1991), Chothia (Chothia et al. (1987) J Mol Biol 196:901-17), IMGT (Lefranc et al. (2003) Dev Comp Immunol 27:55-77) and AbM (Martin and Thornton J Bmol Biol 263:800-15, 1996). The correspondence between the various delineations and variable region numbering is described (see e.g. Lefranc et al. (2003) Dev Comp Immunol 27:55-77; Honegger and Pluckthun, J Mol Biol (2001) 309:657-70; International ImMunoGeneTics (IMGT) database; Web resources, http://www_imgt_org). Available programs such as abYsis by UCL Business PLC may be used to delineate CDRs. The term “CDR”, “HCDR1”, “HCDR2”, “HCDR3”, “LCDR1”, “LCDR2” and “LCDR3” as used herein includes CDR₅ defined by any of the methods described supra, Kabat, Chothia, IMGT or AbM, unless otherwise explicitly stated in the specification.

[0061] “Decrease,” “lower,” “lessen,” “reduce,” or “abate” refers generally to the ability of a test molecule to mediate a reduced response (i.e., downstream effect) when compared to the response mediated by a control or a vehicle. Exemplary responses are T cell expansion, T cell activation or T-cell mediated tumor cell killing or binding of a protein to its antigen or receptor, enhanced binding to a Fcγ or enhanced Fc effector functions such as enhanced ADCC, CDC and/or ADCP. Decrease may be a statistically significant difference in the measured response between the test molecule and the control (or the vehicle), or a decrease in the measured response, such as a decrease of about 1.1, 1.2, 1.5, 2, 3, 4, 5, 6, 7, 8, 9, 10, 15, 20 or 30 fold or more, such as 500, 600, 700, 800, 900 or 1000 fold or more (including all integers and decimal points in between and above 1, e.g., 1.5, 1.6, 1.7, 1.8, etc.).

[0062] “Differentiation” refers to a method of decreasing the potency or proliferation of a cell or moving the cell to a more developmentally restricted state.

[0063] “Encode” or “encoding” refers to the inherent property of specific sequences of nucleotides in a polynucleotide, such as a gene, a cDNA, or an mRNA, to serve as templates for synthesis of other polymers and macromolecules in biological processes having either a defined sequence of nucleotides (e.g., rRNA, tRNA and mRNA) or a defined sequence of amino acids and the biological properties resulting therefrom. Thus, a gene, cDNA, or RNA, encodes a protein if transcription and translation of mRNA corresponding to that gene produces the protein in a cell or other biological system. Both the coding strand, the nucleotide sequence of which is identical to the mRNA sequence, and the non-coding strand, used as the template for transcription of a gene or cDNA, can be referred to as encoding the protein or other product of that gene or cDNA.

[0064] “Enhance,” “promote,” “increase,” “expand” or “improve” refers generally to the ability of a test molecule to mediate a greater response (i.e., downstream effect) when compared to the response mediated by a control or a vehicle. Exemplary responses are T cell expansion, T cell activation or T-cell mediated tumor cell killing or binding of a protein to its antigen or receptor, enhanced binding to a Fcγ or enhanced Fc effector functions such as enhanced ADCC, CDC and/or ADCP. Enhance may be a statistically significant difference in the measured response between the test molecule and control (or vehicle), or an increase in the measured response, such as an increase of about 1.1, 1.2, 1.5, 2, 3, 4, 5, 6, 7, 8, 9, 10, 15, 20 or 30 fold or more, such as 500, 600, 700, 800, 900 or 1000 fold or more (including all integers and decimal points in between and above 1, e.g., 1.5, 1.6, 1.7. 1.8, etc.).

[0065] “Epitope” refers to a portion of an antigen to which an antibody specifically binds. Epitopes typically consist of chemically active (such as polar, non-polar or hydrophobic) surface groupings of moieties such as amino acids or polysaccharide side chains and may have specific three-dimensional structural characteristics, as well as specific charge characteristics. An epitope may be composed of contiguous and/or discontinuous amino acids that form a conformational spatial unit. For a discontinuous epitope, amino acids from differing portions of the linear sequence of the antigen come in close proximity in 3-dimensional space through the folding of the protein molecule. Antibody “epitope” depends on the methodology used to identify the epitope.

[0066] “Expansion” refers to the outcome of cell division and cell death.

[0067] “Express” and “expression” refers the to the well-known transcription and translation occurring in cells or in vitro. The expression product, e.g., the protein, is thus expressed by the cell or in vitro and may be an intracellular, extracellular or a transmembrane protein.

[0068] “Expression vector” refers to a vector that can be utilized in a biological system or in a reconstituted biological system to direct the translation of a polypeptide encoded by a polynucleotide sequence present in the expression vector.

[0069] “dAb” or “dAb fragment” refers to an antibody fragment composed of a VH domain (Ward et al., Nature 341:544 546 (1989)).

[0070] “Fab” or “Fab fragment” or “Fab region” refers to an antibody region that binds to antigens. A conventional IgG usually comprises two Fab regions, each residing on one of the two arms of the Y-shaped IgG structure. Each Fab region is typically composed of one variable region and one constant region of each of the heavy and the light chain. More specifically, the variable region and the constant region of the heavy chain in a Fab region are VH and CH1 regions, and the variable region and the constant region of the light chain in a Fab region are VL and CL regions. The VH, CH1, VL, and CL in a Fab region can be arranged in various ways to confer an antigen binding capability according to the present disclosure. For example, VH and CH1 regions can be on one polypeptide, and VL and CL regions can be on a separate polypeptide, similarly to a Fab region of a conventional IgG. Alternatively, VH, CH1, VL and CL regions can all be on the same polypeptide and oriented in different orders.

[0071] “F(ab′)₂” or “F(ab′)₂ fragment” refers to an antibody fragment containing two Fab fragments connected by a disulfide bridge in the hinge region.

[0072] “Fd” or “Fd fragment” refers to an antibody fragment composed of VH and CH1 domains.

[0073] “Fv” or “Fv fragment” refers to an antibody fragment composed of the VH and the VL domains from a single arm of the antibody. Fv fragments lack the constant regions of Fab (CH1 and CL) regions. The VH and VL in Fv fragments are held together by non-covalent interactions.

[0074] “Fc” polypeptide” of a dimeric Fc refers to one of the two polypeptide forming the dimeric Fc domain. For example, an Fc polypeptide of a dimeric IgG FC comprises an IgG CH2 and an IgG CH3 constant domain sequence).

[0075] “Full length antibody” is comprised of two heavy chains (HC) and two light chains (LC) inter-connected by disulfide bonds as well as multimers thereof (e.g. IgM). Each heavy chain is comprised of a heavy chain variable domain (VH) and a heavy chain constant domain, the heavy chain constant domain comprised of subdomains CH1, hinge, CH2 and CH3. Each light chain is comprised of a light chain variable domain (VL) and a light chain constant domain (CL). The VH and the VL may be further subdivided into regions of hypervariability, termed complementarity determining regions (CDR), interspersed with framework regions (FR). Each VH and VL is composed of three CDR₅ and four FR segments, arranged from amino-to-carboxy-terminus in the following order: FR1, CDR1, FR2, CDR2, FR3, CDR3 and FR4.

[0076] “Host cell” refers to any cell that contains a heterologous nucleic acid. An exemplary heterologous nucleic acid is a vector (e.g., an expression vector).

[0077] “Human antibody” refers to an antibody that is optimized to have minimal immune response when administered to a human subject. Variable regions of human antibody are derived from human immunoglobulin sequences. If human antibody contains a constant region or a portion of the constant region, the constant region is also derived from human immunoglobulin sequences. Human antibody comprises heavy and light chain variable regions that are “derived from” sequences of human origin if the variable regions of the human antibody are obtained from a system that uses human germline immunoglobulin or rearranged immunoglobulin genes. Such exemplary systems are human immunoglobulin gene libraries displayed on phage, and transgenic non-human animals such as mice or rats carrying human immunoglobulin loci. “Human antibody” typically contains amino acid differences when compared to the immunoglobulins expressed in humans due to differences between the systems used to obtain the human antibody and human immunoglobulin loci, introduction of somatic mutations or intentional introduction of substitutions into the frameworks or CDR₅, or both. Typically, “human antibody” is at least about 80%, 81%, 82%, 83%, 84%, 85%, 86%, 87%, 88%, 89%, 90%, 91%, 92%, 93%, 94%, 95%, 96%, 97%, 98% or 99% identical in amino acid sequence to an amino acid sequence encoded by human germline immunoglobulin or rearranged immunoglobulin genes. In some cases, “human antibody” may contain consensus framework sequences derived from human framework sequence analyses, for example as described in Knappik et al., (2000) J Mol Biol 296:57-86, or a synthetic HCDR3 incorporated into human immunoglobulin gene libraries displayed on phage, for example as described in Shi et al., (2010) J Mol Biol 397:385-96, and in Int. Patent Publ. No. WO2009/085462. Antibodies in which at least one CDR is derived from a non-human species are not included in the definition of “human antibody”

[0078] “Humanized antibody” refers to an antibody in which at least one CDR is derived from non-human species and at least one framework is derived from human immunoglobulin sequences. Humanized antibody may include substitutions in the frameworks so that the frameworks may not be exact copies of expressed human immunoglobulin or human immunoglobulin germline gene sequences.

[0079] “In combination with” means that two or more therapeutic agents are be administered to a subject together in a mixture, concurrently as single agents or sequentially as single agents in any order.

[0080] “Isolated” refers to a homogenous population of molecules (such as synthetic polynucleotides or polypeptides) which have been substantially separated and/or purified away from other components of the system the molecules are produced in, such as a recombinant cell, as well as a protein that has been subjected to at least one purification or isolation step. “Isolated” refers to a molecule that is substantially free of other cellular material and/or chemicals and encompasses molecules that are isolated to a higher purity, such as to 80%, 81%, 82%, 83%, 84%, 85%, 86%, 87%, 88%, 89%, 90%, 91%, 92%, 93%, 94%, 95%, 96%, 97%, 98%, 99% or 100% purity.

[0081] “Kallikrein related peptidase 2” or “hK2” (also referred to herein as KLK2) refers to a known protein which is also called kallikrein-2, grandular kallikrein 2, or HK2. hK2 is produced as a preproprotein and cleaved during proteolysis to generate active protease. All hK2 isoforms and variants are encompassed in “hK2”. The amino acid sequences of the various isoforms are retrievable from GenBank accession numbers NP_005542.1, NP_001002231.1 and NP_001243009. The amino acid sequence of a full length hK2 is shown in SEQ ID NO: 62. The sequence includes the signal peptide (residues 1-18) and the pro-peptide region (residues 19-24).

SEQ ID NO: 62
MWDLVLSIALSVGCTGAVPLIQSRIVGGWECEKHSQPWQVAVYSHGWAHC
GGVLVHPQWVLTAAHCLKKNSQVWLGRHNLFEPEDTGQRVPVSHSFPHPL
YNMSLLKHQSLRPDEDSSHDLMLLRLSEPAKITDVVKVLGLPTQEPALGT
TCYASGWGSIEPEEFLRPRSLQCVSLHLLSNDMCARAYSEKVTEFMLCAG
LWTGGKDTCGGDSGGPLVCNGVLQGITSWGPEPCALPEKPAVYTKVVHYR
KWIKDTIAANP

[0082] “Modulate” refers to either enhanced or decreased ability of a test molecule to mediate an enhanced or a reduced response (i.e., downstream effect) when compared to the response mediated by a control or a vehicle.

[0083] “Monoclonal antibody” refers to an antibody obtained from a substantially homogenous population of antibody molecules, i.e., the individual antibodies comprising the population are identical except for possible well-known alterations such as removal of C-terminal lysine from the antibody heavy chain or post-translational modifications such as amino acid isomerization or deamidation, methionine oxidation or asparagine or glutamine deamidation. Monoclonal antibodies typically bind one antigenic epitope. A bispecific monoclonal antibody binds two distinct antigenic epitopes. Monoclonal antibodies may have heterogeneous glycosylation within the antibody population. Monoclonal antibody may be monospecific or multispecific such as bispecific, monovalent, bivalent or multivalent.

[0084] “Operatively linked” and similar phrases, when used in reference to nucleic acids or amino acids, refers to the operational linkage of nucleic acid sequences or amino acid sequence, respectively, placed in functional relationships with each other. For example, an operatively linked promoter, enhancer elements, open reading frame, 5′ and 3′ UTR, and terminator sequences result in the accurate production of a nucleic acid molecule (e.g., RNA) and in some instances to the production of a polypeptide (i.e., expression of the open reading frame). Operatively linked peptide refers to a peptide in which the functional domains of the peptide are placed with appropriate distance from each other to impart the intended function of each domain.

[0085] The term “paratope” refers to the area or region of an antibody molecule which is involved in binding of an antigen and comprise residues that interact with an antigen. A paratope may composed of continuous and/or discontinuous amino acids that form a conformational spatial unit. The paratope for a given antibody can be defined and characterized at different levels of details using a variety of experimental and computational methods. The experimental methods include hydrogen/deuterium exchange mass spectrometry (HX-MS). The paratope will be defined differently depending on the mapping method employed.

[0086] “Pharmaceutical combination” refers to a combination of two or more active ingredients administered either together or separately.

[0087] “Pharmaceutical composition” refers to a composition that results from combining an active ingredient and a pharmaceutically acceptable carrier.

[0088] “Pharmaceutically acceptable carrier” or “excipient” refers to an ingredient in a pharmaceutical composition, other than the active ingredient, which is nontoxic to a subject. Exemplary pharmaceutically acceptable carriers are a buffer, stabilizer or preservative.

[0089] “Polynucleotide” or “nucleic acid” refers to a synthetic molecule comprising a chain of nucleotides covalently linked by a sugar-phosphate backbone or other equivalent covalent chemistry. cDNA is a typical example of a polynucleotide. Polynucleotide may be a DNA or a RNA molecule.

[0090] “Prevent,” “preventing,” “prevention,” or “prophylaxis” of a disease or disorder means preventing that a disorder occurs in a subject.

[0091] “Proliferation” refers to an increase in cell division, either symmetric or asymmetric division of cells.

[0092] “Promoter” refers to the minimal sequences required to initiate transcription. Promoter may also include enhancers or repressor elements which enhance or suppress transcription, respectively.

[0093] “Protein” or “polypeptide” are used interchangeably herein are refers to a molecule that comprises one or more polypeptides each comprised of at least two amino acid residues linked by a peptide bond. Protein may be a monomer, or may be protein complex of two or more subunits, the subunits being identical or distinct. Small polypeptides of less than 50 amino acids may be referred to as “peptides”. Protein may be a heterologous fusion protein, a glycoprotein, or a protein modified by post-translational modifications such as phosphorylation, acetylation, myristoylation, palmitoylation, glycosylation, oxidation, formylation, amidation, citrullination, polyglutamylation, ADP-ribosylation, pegylation or biotinylation. Protein may be recombinantly expressed.

[0094] “Recombinant” refers to polynucleotides, polypeptides, vectors, viruses and other macromolecules that are prepared, expressed, created or isolated by recombinant means.

[0095] “Regulatory element” refers to any cis—or trans acting genetic element that controls some aspect of the expression of nucleic acid sequences.

[0096] “Relapsed” refers to the return of a disease or the signs and symptoms of a disease after a period of improvement after prior treatment with a therapeutic.

[0097] “Refractory” refers to a disease that does not respond to a treatment. A refractory disease can be resistant to a treatment before or at the beginning of the treatment, or a refractory disease can become resistant during a treatment.

[0098] “Single chain Fv” or “scFv” refers to a fusion protein comprising at least one antibody fragment comprising a light chain variable region (VL) and at least one antibody fragment comprising a heavy chain variable region (VH), wherein the VL and the VH are contiguously linked via a polypeptide linker, and capable of being expressed as a single chain polypeptide. Unless specified, as used herein, a scFv may have the VL and VH variable regions in either order, e.g., with respect to the N-terminal and C-terminal ends of the polypeptide, the scFv may comprise VL-linker-VH or may comprise VH-linker-VL.

[0099] “(scFv)₂” or “tandem scFv” or “bis-scFv” fragments refers to a fusion protein comprising two light chain variable region (VL) and two heavy chain variable region (VH), wherein the two VL and the two VH regions are contiguously linked via polypeptide linkers, and capable of being expressed as a single chain polypeptide. The two VL and two VH regions fused by peptide linkers form a bivalent molecule VLA-linker-VHA-linker-VLB-linker-VHB to form two binding sites, capable of binding two different antigens or epitopes concurrently.

[0100] “Specifically binds,” “specific binding,” “specifically binding” or “binds” refer to a protein molecule binding to an antigen or an epitope within the antigen with greater affinity than for other antigens. Typically, the protein molecule binds to the antigen or the epitope within the antigen with an equilibrium dissociation constant (K_{D}) of about 1×10⁻⁷ M or less, for example about 5×10⁻⁸ M or less, about 1×10⁻⁸ M or less, about 1×10⁻⁹ M or less, about 1×10⁻¹⁰ M or less, about 1×10⁻¹¹ M or less, or about 1×10⁻¹² M or less, typically with the K_{D} that is at least one hundred fold less than its K_{D} for binding to a non-specific antigen (e.g., BSA, casein). In the context of the prostate neoantigens described here, “specific binding” refers to binding of the protein molecule to the prostate neoantigen without detectable binding to a wild-type protein the neoantigen is a variant of. As used herein, an antibody or antigen binding domain “with binding specificity for hK2” refers to an antibody or antigen binding domain that specifically binds to hK2, respectively.

[0101] “Subject” includes any human or nonhuman animal. “Nonhuman animal” includes all vertebrates, e.g., mammals and non-mammals, such as nonhuman primates, sheep, dogs, cats, horses, cows, chickens, amphibians, reptiles, etc. The terms “subject” and “patient” can be used interchangeably herein.

[0102] “T cell” and “T lymphocyte” are interchangeable and used synonymously herein. T cell includes thymocytes, naïve T lymphocytes, memory T cells, immature T lymphocytes, mature T lymphocytes, resting T lymphocytes, or activated T lymphocytes. A T cell can be a T helper (Th) cell, for example a T helper 1 (Th1) or a T helper 2 (Th2) cell. The T cell can be a helper T cell (HTL; CD4 ⁺ T cell) CD4 ⁺ T cell, a cytotoxic T cell (CTL; CD8 ⁺ T cell), a tumor infiltrating cytotoxic T cell (TIL; CD8 ⁺ T cell), CD4 CD8 ⁺ T cell, or any other subset of T cells. Also included are “NKT cells”, which refer to a specialized population of T cells that express a semi-invariant αβ T-cell receptor, but also express a variety of molecular markers that are typically associated with NK cells, such as NK1.1. NKT cells include NK1.1′ and NK1.1″, as well as CD4⁺, CD4⁻, CD8⁺ and CD8⁻ cells. The TCR on NKT cells is unique in that it recognizes glycolipid antigens presented by the MHC I-like molecule CD Id. NKT cells can have either protective or deleterious effects due to their abilities to produce cytokines that promote either inflammation or immune tolerance. Also included are “gamma-delta T cells (γδ T cells),” which refer to a specialized population that to a small subset of T cells possessing a distinct TCR on their surface, and unlike the majority of T cells in which the TCR is composed of two glycoprotein chains designated α- and β- TCR chains, the TCR in γδ T cells is made up of a γ-chain and a δ-chain. γδ T cells can play a role in immunosurveillance and immunoregulation and were found to be an important source of IL-17 and to induce robust CD8 cytotoxic T cell response. Also included are “regulatory T cells” or “Tregs” which refer to T cells that suppress an abnormal or excessive immune response and play a role in immune tolerance. Tregs are typically transcription factor Foxp3-positive CD4 ⁺ T cells and can also include transcription factor Foxp3-negative regulatory T cells that are IL-10-producing CD4 ⁺ T cells.

[0103] “Therapeutically effective amount” or “effective amount” used interchangeably herein, refers to an amount effective, at dosages and for periods of time necessary, to achieve a desired therapeutic result. A therapeutically effective amount may vary according to factors such as the disease state, age, sex, and weight of the individual, and the ability of a therapeutic or a combination of therapeutics to elicit a desired response in the individual. Example indicators of an effective therapeutic or combination of therapeutics that include, for example, improved well-being of the patient, reduction of a tumor burden, arrested or slowed growth of a tumor, and/or absence of metastasis of cancer cells to other locations in the body.

[0104] “Transduction” refers to the introduction of a foreign nucleic acid into a cell using a viral vector.

[0105] “Treat,” “treating” or “treatment” of a disease or disorder such as cancer refers to accomplishing one or more of the following: reducing the severity and/or duration of the disorder, inhibiting worsening of symptoms characteristic of the disorder being treated, limiting or preventing recurrence of the disorder in subjects that have previously had the disorder, or limiting or preventing recurrence of symptoms in subjects that were previously symptomatic for the disorder.

[0106] “Tumor cell” or a “cancer cell” refers to a cancerous, pre-cancerous or transformed cell, either in vivo, ex vivo, or in tissue culture, that has spontaneous or induced phenotypic changes. These changes do not necessarily involve the uptake of new genetic material. Although transformation may arise from infection with a transforming virus and incorporation of new genomic nucleic acid, uptake of exogenous nucleic acid or it can also arise spontaneously or following exposure to a carcinogen, thereby mutating an endogenous gene.

[0107] Transformation/cancer is exemplified by morphological changes, immortalization of cells, aberrant growth control, foci formation, proliferation, malignancy, modulation of tumor specific marker levels, invasiveness, tumor growth in suitable animal hosts such as nude mice, and the like, in vitro, in vivo, and ex vivo.

[0108] “Variant,” “mutant” or “altered” refers to a polypeptide or a polynucleotide that differs from a reference polypeptide or a reference polynucleotide by one or more modifications, for example one or more substitutions, insertions or deletions.

[0109] The numbering of amino acid residues in the antibody constant region throughout the specification is according to the EU index as described in Kabat et al., Sequences of Proteins of Immunological Interest, 5th Ed. Public Health Service, National Institutes of Health, Bethesda, MD. (1991), unless otherwise explicitly stated.

[0110] Mutations in the Ig constant regions are referred to as follows: L351Y F405A_Y407V refers to L351Y, F405A and Y407V mutations in one immunoglobulin constant region. L351Y_F405A_Y407V/T394W refers to L351Y, F405A and Y407V mutations in the first Ig constant region and T394W mutation in the second Ig constant region, which are present in one multimeric protein.

[0111] “VHH” refers to a single-domain antibody or nanobody, exclusively composed of the antigen binding domain of a heavy chain. A VHH single domain antibody lacks the light chain and the CH1 domain of the heavy chain of conventional Fab region.

### Chemical Nomenclature

[0112] Generally, reference to a certain element such as hydrogen or H is meant to include all isotopes of that element. For example, if an R group is defined to include hydrogen or H, it also includes deuterium and tritium. Compounds comprising radioisotopes such as tritium, C¹⁴, p³² and S³⁵ are thus within the scope of the present technology. Procedures for inserting such labels into the compounds of the present technology will be readily apparent to those skilled in the art based on the disclosure herein.

[0113] The term “substituted” means that at least one hydrogen atom is replaced with a non-hydrogen group, provided that all normal valencies are maintained and that the substitution results in a stable compound. When a particular group is “substituted,” that group can have one or more substituents, preferably from one to five substituents, more preferably from one to three substituents, most preferably from one to two substituents, independently selected from the list of substituents. For example, “substituted” refers to an organic group as defined below (e.g., an alkyl group) in which one or more bonds to a hydrogen atom contained therein are replaced by a bond to non-hydrogen or non-carbon atoms. Substituted groups also include groups in which one or more bonds to a carbon(s) or hydrogen(s) atom are replaced by one or more bonds, including double or triple bonds, to a heteroatom. Thus, a substituted group is substituted with one or more substituents, unless otherwise specified. In some embodiments, a substituted group is substituted with 1, 2, 3, 4, 5, or 6 substituents. Examples of substituent groups include: halogens (i.e., F, Cl, Br, and I); hydroxyls; alkoxy, alkenoxy, aryloxy, aralkyloxy, heterocyclyl, heterocyclylalkyl, heterocyclyloxy, and heterocyclylalkoxy groups; carbonyls (oxo); carboxylates; esters; urethanes; oximes; hydroxylamines; alkoxyamines; aralkoxyamines; thiols; sulfides; sulfoxides; sulfones; sulfonyls; pentafluorosulfanyl (i.e., SFs), sulfonamides; amines; N-oxides; hydrazines; hydrazides; hydrazones; azides; amides; ureas; amidines; guanidines; enamines; imides; isocyanates; isothiocyanates; cyanates; thiocyanates; imines; nitro groups; nitriles (i.e., CN); and the like. The term “independently” when used in reference to substituents, means that when more than one of such substituents is possible, such substituents can be the same or different from each other.

[0114] Substituted ring groups such as substituted cycloalkyl, aryl, heterocyclyl and heteroaryl groups also include rings and ring systems in which a bond to a hydrogen atom is replaced with a bond to a carbon atom. Therefore, substituted cycloalkyl, aryl, heterocyclyl and heteroaryl groups may also be substituted with substituted or unsubstituted alkyl, alkenyl, and alkynyl groups as defined below.

[0115] As used herein, Cm-Cn, such as C₁-C₁₁, C₁-C₈, or C₁-C₆ when used before a group refers to that group containing m to n carbon atoms.

[0116] Alkyl groups include straight chain and branched chain alkyl groups having from 1 to 12 carbon atoms, and typically from 1 to 10 carbons or, in some embodiments, from 1 to 8, 1 to 6, or 1 to 4 carbon atoms. Examples of straight chain alkyl groups include groups such as methyl, ethyl, n-propyl, n-butyl, n-pentyl, n-hexyl, n-heptyl, and n-octyl groups. Examples of branched alkyl groups include, but are not limited to, isopropyl, iso-butyl, sec-butyl, tert-butyl, neopentyl, isopentyl, and 2,2-dimethylpropyl groups. Alkyl groups may be substituted or unsubstituted. Representative substituted alkyl groups may be substituted one or more times with substituents such as those listed above, and include without limitation haloalkyl (e.g., trifluoromethyl), hydroxyalkyl, thioalkyl, aminoalkyl, alkylaminoalkyl, dialkylaminoalkyl, alkoxyalkyl, carboxyalkyl, and the like.

[0117] Cycloalkyl groups include mono-, bi- or tricyclic alkyl groups having from 3 to 12 carbon atoms in the ring(s), or, in some embodiments, 3 to 10, 3 to 8, or 3 to 4, 5, or 6 carbon atoms. Exemplary monocyclic cycloalkyl groups include, but not limited to, cyclopropyl, cyclobutyl, cyclopentyl, cyclohexyl, cycloheptyl, and cyclooctyl groups. In some embodiments, the cycloalkyl group has 3 to 8 ring members, whereas in other embodiments the number of ring carbon atoms range from 3 to 5, 3 to 6, or 3 to 7. Bi—and tricyclic ring systems include both bridged cycloalkyl groups and fused rings, such as, but not limited to, bicyclo[2.1.1]hexane, adamantyl, decalinyl, and the like. Cycloalkyl groups may be substituted or unsubstituted. Substituted cycloalkyl groups may be substituted one or more times with, non-hydrogen and non-carbon groups as defined above. However, substituted cycloalkyl groups also include rings that are substituted with straight or branched chain alkyl groups as defined above. Representative substituted cycloalkyl groups may be mono-substituted or substituted more than once, such as, but not limited to, 2,2-, 2,3-, 2,4-2,5- or 2,6-disubstituted cyclohexyl groups, which may be substituted with substituents such as those listed above.

[0118] Cycloalkylalkyl groups are alkyl groups as defined above in which a hydrogen or carbon bond of an alkyl group is replaced with a bond to a cycloalkyl group as defined above. In some embodiments, cycloalkylalkyl groups have from 4 to 16 carbon atoms, 4 to 12 carbon atoms, and typically 4 to 10 carbon atoms. Cycloalkylalkyl groups may be substituted or unsubstituted. Substituted cycloalkylalkyl groups may be substituted at the alkyl, the cycloalkyl or both the alkyl and cycloalkyl portions of the group. Representative substituted cycloalkylalkyl groups may be mono-substituted or substituted more than once, such as, but not limited to, mono-, di- or tri-substituted with substituents such as those listed above.

[0119] Alkenyl groups include straight and branched chain alkyl groups as defined above, except that at least one double bond exists between two carbon atoms. Alkenyl groups have from 2 to 12 carbon atoms, and typically from 2 to 10 carbons or, in some embodiments, from 2 to 8, 2 to 6, or 2 to 4 carbon atoms. In some embodiments, an alkenyl can have one carbon-carbon double bond. or multiple carbon-carbon double bonds, such as 2, 3, 4 or more carbon-carbon double bonds. Examples of alkenyl groups include, but are not limited to methenyl. ethenyl, propenyl. butenyl, etc. Alkenyl groups may be substituted or unsubstituted. Representative substituted alkenyl groups may be mono-substituted or substituted more than once, such as, but not limited to, mono-, di- or tri-substituted with substituents such as those listed above.

[0120] Cycloalkenyl groups include cycloalkyl groups as defined above, having at least one double bond between two carbon atoms. Cycloalkenyl group can be a mono- or polycyclic alkyl group having from 3 to 12, more preferably from 3 to 8 carbon atoms in the ring(s) and comprising at least one double bond between two carbon atoms. Cycloalkenyl groups may be substituted or unsubstituted. In some embodiments the cycloalkenyl group may have one, two or three double bonds or multiple carbon-carbon double bonds, such as 2, 3, 4, or more carbon-carbon double bonds.but does not include aromatic compounds. Cycloalkenyl groups have from 3 to 14 carbon atoms, or, in some embodiments, 5 to 14 carbon atoms, 5 to 10 carbon atoms, or even 5, 6, 7, or 8 carbon atoms. Examples of cycloalkenyl groups include cyclohexenyl, cyclopentenyl, cyclohexadienyl, cyclobutadienyl, and cyclopentadienyl.

[0121] Cycloalkenylalkyl groups are alkyl groups as defined above in which a hydrogen or carbon bond of the alkyl group is replaced with a bond to a cycloalkenyl group as defined above. Cycloalkenylalkyl groups may be substituted or unsubstituted. Substituted cycloalkenylalkyl groups may be substituted at the alkyl, the cycloalkenyl or both the alkyl and cycloalkenyl portions of the group. Representative substituted cycloalkenylalkyl groups may be substituted one or more times with substituents such as those listed above.

[0122] Alkynyl groups include straight and branched chain alkyl groups as defined above, except that at least one triple bond exists between two carbon atoms. Alkynyl groups have from 2 to 12 carbon atoms, and typically from 2 to 10 carbons or, in some embodiments, from 2 to 8, 2 to 6, or 2 to 4 carbon atoms. In some embodiments, the alkynyl group has one, two, or three carbon-carbon triple bonds. Examples include, but are not limited to —C═CH, —C═CCH₃, —CH₂C═CCH₃, —C—CCH₂CH(CH₂CH₃)₂, among others. Alkynyl groups may be substituted or unsubstituted. A terminal alkyne has at least one hydrogen atom bonded to a triply bonded carbon atom. Representative substituted alkynyl groups may be mono-substituted or substituted more than once, such as, but not limited to, mono-, di- or trisubstituted with substituents such as those listed above. A “cyclic alkyne” or “cycloalkynyl” is a cycloalkyl ring comprising at least one triple bond between two carbon atoms. Examples of cyclic alkynes or cycloalkynyl groups include, but are not limited to, cyclooctyne, bicyclononyne (BCN), difluorinated cyclooctyne (DIFO), dibenzocyclooctyne (DIBO), keto-DIBO, biarylazacyclooctynone (BARAC), dibenzoazacyclooctyne (DIBAC), dimethoxyazacyclooctyne (DIMAC), difluorobenzocyclooctyne (DIFBO), monobenzocyclooctyne (MOBO), and tetramethoxy DIBO (TMDIBO).

[0123] Aryl groups are cyclic aromatic hydrocarbons that do not contain heteroatoms. Aryl groups herein include monocyclic, bicyclic and tricyclic ring systems. Thus, aryl groups include, but are not limited to, phenyl, azulenyl, heptalenyl, biphenyl, fluorenyl, phenanthrenyl, anthracenyl, indenyl, indanyl, pentalenyl, and naphthyl groups. In some embodiments, aryl groups contain 6-14 carbons, and in others from 6 to 12 or even 6-10 carbon atoms in the ring portions of the groups. In some embodiments, the aryl groups are phenyl or naphthyl. Aryl groups may be substituted or unsubstituted. The phrase “aryl groups” includes groups containing fused rings, such as fused aromatic-aliphatic ring systems (e.g., indanyl, tetrahydronaphthyl, and the like). Representative substituted aryl groups may be monosubstituted or substituted more than once. For example, monosubstituted aryl groups include, but are not limited to, 2-, 3—, 4-, 5-, or 6-substituted phenyl or naphthyl groups, which may be substituted with substituents such as those listed above. Aryl moieties are well known and described, for example, in Lewis, R. J., ed., Hawley's Condensed Chemical Dictionary, 13th Edition, John Wiley & Sons, Inc., New York (1997). An aryl group can be a single ring structure (i.e., monocyclic) or comprise multiple ring structures (i.e., polycyclic)that are fused ring structures. Preferably, an aryl group is a monocyclic aryl group.

[0124] Alkoxy groups are hydroxyl groups (—OH) in which the bond to the hydrogen atom is replaced by a bond to a carbon atom of a substituted or unsubstituted alkyl group as defined above. Examples of linear alkoxy groups include but are not limited to methoxy, ethoxy, propoxy, butoxy, pentoxy, hexoxy, and the like. Examples of branched alkoxy groups include but are not limited to isopropoxy, sec-butoxy, tert-butoxy, isopentoxy, isohexoxy, and the like. Examples of cycloalkoxy groups include but are not limited to cyclopropyloxy, cyclobutyloxy, cyclopentyloxy, cyclohexyloxy, and the like. Alkoxy groups may be substituted or unsubstituted. Representative substituted alkoxy groups may be substituted one or more times with substituents such as those listed above.

[0125] Similarly, alkylthio or thioalkoxy refers to an-SR group in which R is an alkyl attached to the parent molecule through a sulfur bridge, for example, —S-methyl, —S-ethyl, etc. Representative examples of alkylthio include, but are not limited to, —SCH₃, —SCH₂CH₃, etc.

[0126] The term “halogen” as used herein refers to bromine, chlorine, fluorine, or iodine. Correspondingly, the term “halo” means fluoro, chloro, bromo, or iodo. In some embodiments, the halogen is fluorine. In other embodiments, the halogen is chlorine or bromine.

[0127] The terms “hydroxy” and “hydroxyl” can be used interchangeably and refer to —OH. The term “carboxy” refers to —COOH.

[0128] The term “cyano” refers to —CN.

[0129] The term “nitro” refers to —NO₂.

[0130] The term “isothiocyanate” refers to —N═C═S.

[0131] The term “isocyanate” refers to —N═C═O.

[0132] The term “azido” refers to —N₃.

[0133] The term “amino” refers to —NH₂. The term “alkylamino” refers to an amino group in which one or both of the hydrogen atoms attached to nitrogen is substituted with an alkyl group. An alkylamine group can be represented as —NR₂ in which each R is independently a hydrogen or alkyl group. For example, alkylamine includes methylamine (—NHCH₃), dimethylamine (—N(CH₃)₂), —NHCH₂CH₃, etc. The term “aminoalkyl” as used herein is intended to include both branched and straight-chain saturated aliphatic hydrocarbon groups substituted with one or more amino groups. Representative examples of aminoalkyl groups include, but are not limited to, —CH₂NH₂, —CH₂CH₂NH₂, and —CH₂CH(NH₂)CH₃.

[0134] As used herein, “amide” refers to —C(O)N(R)₂, wherein each R is independently an alkyl group or a hydrogen. Examples of amides include, but are not limited to, —C(O)NH₂, —C(O)NHCH₃, and —C(O)N(CH₃)₂.

[0135] The terms “hydroxylalkyl” and “hydroxyalkyl” are used interchangeably, and refer to an alkyl group substituted with one or more hydroxyl groups. The alkyl can be a branched or straight-chain aliphatic hydrocarbon. Examples of hydroxylalkyl include, but are not limited to, hydroxylmethyl (—CH₂OH), hydroxylethyl (—CH₂CH₂OH), etc.

[0136] As used herein, the term “heterocyclyl” includes stable monocyclic and polycyclic hydrocarbons that contain at least one heteroatom ring member, such as sulfur, oxygen, or nitrogen. As used herein, the term “heteroaryl” includes stable monocyclic and polycyclic aromatic hydrocarbons that contain at least one heteroatom ring member such as sulfur, oxygen, or nitrogen. Heteroaryl can be monocyclic or polycyclic, e.g., bicyclic or tricyclic. Each ring of a heterocyclyl or heteroaryl group containing a heteroatom can contain one or two oxygen or sulfur atoms and/or from one to four nitrogen atoms provided that the total number of heteroatoms in each ring is four or less and each ring has at least one carbon atom. Heteroaryl groups which are polycyclic, e.g., bicyclic or tricyclic must include at least one fully aromatic ring but the other fused ring or rings can be aromatic or non-aromatic. The heterocyclyl or heteroaryl group can be attached at any available nitrogen or carbon atom of any ring of the heterocyclyl or heteroaryl group. Preferably, the term “heteroaryl” refers to 5- or 6-membered monocyclic groups and 9- or 10-membered bicyclic groups which have at least one heteroatom (O, S, or N) in at least one of the rings, wherein the heteroatom-containing ring preferably has 1, 2, or 3 heteroatoms, more preferably 1 or 2 heteroatoms, selected from O, S, and/or N. The nitrogen heteroatom(s) of a heteroaryl can be substituted or unsubstituted. Additionally, the nitrogen and sulfur heteroatom(s) of a heteroaryl can optionally be oxidized (i.e., N—>O and S(O)ᵣ, wherein r is 0, 1 or 2).

[0137] The term “ester” refers to —C(O)₂R, wherein R is alkyl.

[0138] The term “carbamate” refers to —OC(O)NR₂, wherein each R is independently alkyl or hydrogen.

[0139] The term “aldehyde” refers to —C(O) H.

[0140] The term “carbonate” refers to —OC(O) OR, wherein R is alkyl.

[0141] The term “maleimide” refers to a group with the chemical formula H₂C2 (CO)₂NH. The term “maleimido” refers to a maleimide group covalently linked to another group or molecule. Preferably, a maleimido group is N-linked, for example:

[chemical structure]

[0142] The term “acyl halide” refers to —C(O)X, wherein X is halo (e.g., Br, Cl). Exemplary acyl halides include acyl chloride (—C(O)Cl) and acyl bromide (—C(O)Br).

[0143] In accordance with convention used in the art:

[chemical structure]

is used in structural formulas herein to depict the bond that is the point of attachment of the moiety, functional group, or substituent to the core, parent, or backbone structure, such as an antigen binding domain of the present invention.

[0144] When any variable occurs more than one time in any constituent or formula for a compound, its definition at each occurrence is independent of its definition at every other occurrence. Thus, for example, if a group is shown to be substituted with 0-3 R groups, then said group can be optionally substituted with up to three R groups, and at each occurrence, R is selected independently from the definition of R.

[0145] When a bond to a substituent is shown to cross a bond connecting two atoms in a ring, then such substituent can be bonded to any atom on the ring.

[0146] As used herein, the term “radiometal ion” or “radioactive metal ion” or “radioisotope” or “radiometal” refers to one or more isotopes of the elements that emit particles and/or photons. Any radiometal ion known to those skilled in the art in view of the present disclosure can be used in the invention. Non-limiting examples of radioisotopes that may be used for therapeutic applications in accordance with the present invention include, e.g., beta or alpha emitters, such as, e.g., ²²⁵Ac, ¹⁷⁷Lu, -³²P, ⁴⁷Sc, ⁶⁷Cu, ⁷⁷As, ⁸⁹Sr, ⁹⁰Y, ⁹⁹Tc, ¹⁰⁵Rh, ¹⁰⁹Pd, ¹¹¹Ag, ¹³¹I, ¹⁴⁹Tb, ¹⁵²Tb, ¹⁵⁵Tb, ¹⁵³Sm, ¹⁵⁹Gd, ¹⁶⁵Dy, ¹⁶⁶Ho, ¹⁶⁹Er, ¹⁸⁶Re, ¹⁸⁸Re, ¹⁹⁴Ir, ¹⁹⁸Au, ¹⁹⁹Au, ²¹¹At, ²¹²Pb, ²¹²Bi, ²¹³Bi, ²²³Ra, ²⁵⁵Fm and ²²⁷Th. Other non-limiting examples of radioisotopes that may be used as imaging agents in accordance with the present invention include gamma-emitting radioisotopes, such as, e.g., ¹⁷⁷Lu, ⁶²Cu, ⁶⁴Cu, ⁶⁷Ga, ⁶⁸Ga, ⁸⁶Y, ⁸⁹Zr, and ¹¹¹In. In certain embodiments, the radiometal ion is a “therapeutic emitter,” meaning a radiometal ion that is useful as a therapeutic agent, e.g., as a cytotoxic agent that is capable of reducing or inhibiting the growth of, or in particular killing, a cancer cell, such as a prostate cancer cell. Examples of therapeutic emitters include, but are not limited to, beta or alpha emitters, such as, ¹³²La, ¹³⁵La, ³⁴Ce, ¹⁴⁴Nd, ¹⁴⁹Tb, ¹⁵²Tb, ¹⁵⁵Tb, ¹⁵³Sm, ¹⁵⁹Gd, ¹⁶⁵Dy, ¹⁶⁶Ho, ¹⁶⁹Er, ¹⁷⁷Lu, ¹⁸⁶Re, ¹⁸⁸Re, ¹⁹⁴Ir, ¹⁹⁸Au, ¹⁹⁹Au, ²¹¹At, ²¹²Pb, ²¹²Bi, ²¹³Bi, ²²³Ra, ²²⁵Ac, ²⁵⁵Fm and ²²⁷Th, ²²⁶Th, ²³⁰U. Preferably, a radiometal ion used in the invention is an alpha-emitting radiometal ion, such as actinium-225 (²²⁵Ac).

[0147] A “radiometal complex” as used herein refers to a complex comprising a radiometal ion associated with a chelator that is a macrocyclic compound. Typically, a radiometal ion is bound to or coordinated to a macrocyclic compound via coordinate bonding. Heteroatoms of the macrocyclic ring can participate in coordinate bonding of a radiometal ion to a macrocycle compound. A macrocycle compound can be substituted with one or more substituent groups, and the one or more substituent groups can also participate in coordinate bonding of a radiometal ion to a macrocycle compound in addition to, or alternatively to the heteroatoms of the macrocyclic ring.

### Immunoconjugates

[0148] Embodiments of the present invention relate to compositions and methods for targeting hK2 with a short half-life Fab-based radioconjugate to achieve efficacious tumor cell death in prostate cancer patients; preferably, such radioconjugates comprise a Fab (instead of a full-length antibody) and demonstrate an improved safety profile (e.g., as measured by bone marrow toxicity) compared to full-length antibody-based radioconjugates. Embodiments of the Fab-based radioconjugates of the present invention target hK2-expressing prostate cancer cells and demonstrate a short half-life.

[0149] As used herein, an “immunoconjugate” refers to an antibody, or an antigen binding domain, that is conjugated (joined, e.g., bound via a covalent bond) to a second molecule, such as a toxin, drug, radiometal ion, chelator, radiometal complex, etc. A “radioimmunoconjugate” (also referred to herein as a “radioconjugate”) in particular is an immunoconjugate in which an antibody or antigen binding domain is labeled with a radiometal or conjugated to a radiometal complex.

[0150] According to embodiments of the present invention, an immunoconjugate comprises a therapeutic moiety conjugated to an antigen binding domain of the present invention that has binding specificity for hK2. As used herein, a “therapeutic moiety” that forms part of an immunoconjugate may be useful in therapeutic applications and/or imaging applications, i.e., as a therapeutic agent (e.g., a cytotoxic agent) and/or an imaging agent, respectively. For example, therapeutic moieties of the present invention may comprise radiometals. It is noted that certain radiometals may be used as therapeutic agents (e.g., ²²⁵Ac) and/or as imaging agents (e.g., ¹¹¹In). A suitable therapeutic agent is one that is capable of reducing or inhibiting the growth of, or in particular killing, a cancer cell, such as a prostate cancer cell. In certain embodiments, radioconjugates comprising a radioisotope conjugated to an antigen binding domain can deliver a cytotoxic payload with the ability to emit alpha and/or beta particles in the vicinity of a tumor by binding onto cancer cells' surface antigens and initiating cell death.

[0151] According to preferred embodiments, the present invention relates to short half-life immunoconjugates (e.g, short half-life radioimmunococonjugates). As used herein, a “short half-life immunoconjugate” refers to an immunoconjugate comprising an antigen binding domain (e.g., a Fab), wherein the immunoconjugate has an in vivo half-life that is shorter than the in vivo half-life of a comparator immunoconjugate, wherein the comparator immunoconjugate is identical to the short half-life immunoconjugate except the antigen binding domain of the comparator immunoconjugate is replaced with a full-length antibody comprising the antigen binding domain (e.g., a full-length IgG comprising an Fc region and the antigen binding domain). In certain embodiments, a short half-life immunoconjugate of the present invention has a half-life of 36 hours or less, or 24 hours or less, or 12 hours or less, or 6 hours or less, or 3 hours or less. For example, a short half-life immunoconjugate of the present invention may have a half-life from about 1 hour to about 36 hours, or from about 1 hour to about 24 hours, or from about 1 hour to about 12 hours, or from about 1 hour to about 6 hours, or from about 1 hour to about 3 hours, or from about 2 hours to about 3 hours.

[0152] Actinium-225 (²²⁵Ac) is an alpha-emitting radioisotope that is of particular interest for medical applications. Another radioisotope of interest for medical applications is Lutetium-177 (¹⁷⁷Lu), which emits both gamma-irradiation suitable for imaging and medium-energy beta-irradiation suitable for radiotherapy. Non-limiting examples of radioisotopes that may be used for therapeutic applications in accordance with the present invention include, e.g., beta or alpha emitters, such as, e.g., ²²⁵Ac, ¹⁷⁷Lu, -³²P, ⁴⁷Sc, ⁶⁷Cu, ⁷⁷As, ⁸⁹Sr, ⁹⁰Y, ⁹⁹Tc, ¹⁰⁵Rh, ¹⁰⁹Pd, ¹¹¹Ag, ¹³¹I, ¹⁴⁹Tb, ¹⁵²Tb, ¹⁵⁵Tb, ¹⁵³Sm, ¹⁵⁹Gd, ¹⁶⁵Dy, ¹⁶⁶Ho, ¹⁶⁹Er, ¹⁸⁶Re, ¹⁸⁸Re, ¹⁹⁴Ir, ¹⁹⁸Au, ¹⁹⁹Au, ²¹¹At, ²¹²Pb, ²¹²Bi, ²¹³Bi, ²²³Ra, ²⁵⁵Fm and ²²⁷Th. Other non-limiting examples of radioisotopes that may be used as imaging agents in accordance with the present invention include gamma-emitting radioisotopes, such as, e.g., ¹⁷⁷Lu, ⁶²Cu, ⁶⁴Cu, ⁶⁷Ga, ⁶⁸Ga, ⁸⁶Y, ⁸⁹Zr, and ¹¹¹In.

[0153] In certain embodiments, the therapeutic moiety is a cytotoxic agent that is an auristatin derivative, such as MMAE (monomethyl auristatin E) or MMAF (monomethyl auristatin F). For example, the auristatin derivative may be attached to the antibody or antigen binding domain of the invention through the N (amino) terminus or the C (carboxyl) terminus of the peptidic drug moiety (WO02/088172), or via any cysteine engineered into the antibody or antigen binding domain.

### Anti-hK2 Antibodies and Antigen Binding Domains

[0154] As described herein, embodiments of the present invention relate to an immunoconjugate comprising a therapeutic moiety conjugated to an antigen binding domain with binding specificity for kallikrein related peptidase 2 (hK2). According to certain embodiments, the antigen binding domain is a scFv, a (scFv)₂, a Fv, a Fab, a F(ab′)₂, a Fd, a dAb or a VHH. According to a preferred embodiment, the antigen binding domain with binding specificity for hK2 is a Fab.

[0155] According to certain embodiments, the antigen binding domain that binds hK2 (e.g., a Fab) comprises the HCDR1, the HCDR2, the HCDR3, the LCDR1, the LCDR2 and the LCDR3 of SEQ ID NOs: 170, 171, 172, 173, 174 and 175, respectively.

[0156] According to certain embodiments, the antigen binding domain that binds hK2 (e.g., a Fab) comprises a VH which is at least 80% (e.g. at least 85%, at least 90%, at least 95%, at least 99% or 100%) identical to the VH of SEQ ID NO: 162 and a VL which is at least 80% (e.g. at least 85%, at least 90%, at least 95%, at least 99% or 100%) identical to the VL of SEQ ID NO: 163. For example, the antigen binding domain that binds hK2 (e.g., a Fab) comprises a VH which is at least 95% identical to the VH of SEQ ID NO: 162 and a VL which is at least 95% identical to the VL of SEQ ID NO: 163. According to certain embodiments, the antigen binding domain that binds hK2 (e.g., a Fab) comprises the VH of SEQ ID NO: 162 and the VL of SEQ ID NO: 163.

[0157] According to certain embodiments, the antigen binding domain is a “KL2B30 Fab,” also referred to as “Fab of KL2B30,” which is a Fab that comprises (a) a HCDR1, a HCDR2, a HCDR3, a LCDR1, a LCDR2 and a LCDR3 of SEQ ID NOs: 170, 171, 172, 173, 174 and 175, respectively; and/or (b) a VH which is at least 95% identical, or 100% identical, to SEQ ID NO: 162 and a VL which is at least 95% identical, or 100% identical, to SEQ ID NO: 163.

[0158] Non-limiting examples of KL2B30 Fabs include KL2B997 and KL2B1251, which are described in the example section below. The heavy chain and light chain sequences of KL2B997 and KL2B1251 are provided in FIG. 2. KL2B997 has a His-tag and a sortase tag (underlined in FIG. 2) on the heavy chain, and KL2B1251 is tagless.

[0159] In some embodiments, an immunoconjugate of the present invention comprises an antigen binding domain that comprises VL, VH or CDR₅ having amino acid sequences of certain antibodies described below, selected from the group consisting of m11B6, hu11B6, HCF3-LCD6, HCG5-LCB7, KL2B357, KL2B358, KL2B359, KL2B360, KL2B413, KL2B30, KL2B53, KL2B242, KL2B467 and KL2B494. The foregoing antibodies and antigen binding domains, and methods of making them, are described in PCT/IB2020/056972, which is incorporated by reference herein.

[0160] An embodiment of the present invention provides a radioimmunoconjugate having the following structure (which does not show the lysine residue of the Fab that is linked to the phenylthiourea moiety):

[chemical structure]

[0161] (also referred to as TOPA-[C7]-phenylthiourea-Fab),
[0162] wherein M⁺ is a radioisotope, such as actinium-225 (²²⁵Ac), and
[0163] wherein the Fab has binding specificity for hK2, such as a KL2B30 Fab (e.g., KL2B997 or KL2B1251). The Fab preferably comprises (a) a HCDR1, a HCDR2, a HCDR3, a LCDR1, a LCDR2 and a LCDR3 of SEQ ID NOs: 170, 171, 172, 173, 174 and 175, respectively; and/or (b) a VH which is at least 95% identical, or 100% identical, to SEQ ID NO: 162 and a VL which is at least 95% identical, or 100% identical, to SEQ ID NO: 163.

[0164] An embodiment of the present invention provides a radioimmunoconjugate having the following structure (which does not show the lysine residue of the Fab that is linked to the phenylthiourea moiety):

[chemical structure]

[0165] wherein the Fab has binding specificity for hK2, such as a KL2B30 Fab (e.g., KL2B997 or KL2B1251). The Fab preferably comprises (a) a HCDR1, a HCDR2, a HCDR3, a LCDR1, a LCDR2 and a LCDR3 of SEQ ID NOs: 170, 171, 172, 173, 174 and 175, respectively; and/or (b) a VH which is at least 95% identical, or 100% identical, to SEQ ID NO: 162 and a VL which is at least 95% identical, or 100% identical, to SEQ ID NO: 163.

### Specific Enumerated Embodiments

[0166] Exemplary enumerated embodiments of the present invention are provided below.
[0167] 1. An immunoconjugate comprising: a therapeutic moiety conjugated to an antigen binding domain with binding specificity for kallikrein related peptidase 2 (hK2).
[0168] 2. The immunoconjugate of embodiment 1, wherein the therapeutic moiety is a cytotoxic agent.
[0169] 3. The immunoconjugate of embodiment 1, wherein the therapeutic moiety is an imaging agent.
[0170] 4. The immunoconjugate of any of embodiments 1-3, wherein the therapeutic moiety comprises a radiometal.
[0171] 5. The immunoconjugate of embodiment 4, wherein the radiometal is selected from the group consisting of ²²⁵Ac, ¹⁷⁷Lu, ³²P, ⁴⁷Sc, ⁶⁷Cu, ⁷⁷As, ⁸⁹Sr, ⁹⁰Y, ⁹⁹Tc, ¹⁰⁵Rh, ¹⁰⁹Pd, ¹¹¹Ag, ¹³¹I, ¹⁴⁹Tb, ¹⁵²Tb, ¹⁵⁵Tb, ¹⁵³Sm, ¹⁵⁹Gd, ¹⁶⁵Dy, ¹⁶⁶Ho, ¹⁶⁹Er, ¹⁸⁶Re, ¹⁸⁸Re, ¹⁹⁴Ir, ¹⁹⁸Au, ¹⁹⁹Au, ²¹¹At, ²¹²Pb, ²¹²Bi, ²¹³Bi, ²²³Ra, ²⁵⁵Fm, ²²⁷Th, ¹⁷⁷Lu, ⁶²Cu, ⁶⁴Cu, ⁶⁷Ga, ⁶⁸Ga, ⁸⁶Y, ⁸⁹Zr, and ¹¹¹In.
[0172] 6. The immunoconjugate of embodiment 1, wherein the therapeutic moiety is a cytotoxic agent comprising ²²⁵Ac.
[0173] 7. The immunoconjugate of embodiment 1, wherein the therapeutic moiety is an imaging agent comprising ¹¹¹In or ⁶⁴Cu.
[0174] 8. The immunoconjugate according to any of embodiments 4-7, wherein the therapeutic moiety comprises a radiometal complex, wherein the radiometal complex comprises the radiometal bound to a chelator, and wherein the chelator is conjugated to the antigen binding domain with binding specificity for kallikrein related peptidase 2 (hK2).
[0175] 9. The immunoconjugate according to embodiment 8, wherein the chelator is 1,4,7,10-tetraazacyclododecane-1,4,7,10, tetraacetic acid (DOTA), S-2-(4-isothiocyanatobenzyl)-1,4,7-triazacyclononane-1,4,7-triacetic acid (NOTA), 1,4,8,11-tetraazacyclodocedan-1,4,8,11-tetraacetic acid (TETA), 3,6,9,15-tetraazabicyclo[9.3.1]-pentadeca-1 (15),11,13-triene-4-(S)-(4-isothiocyanatobenzyl)-3,6,9-triacetic acid (PCTA), 5-S-(4-aminobenzyl)-1-oxa-4,7,10-triazacyclododecane-4,7,10-tris(acetic acid) (DO3A), or a derivative thereof.
[0176] 10. The immunoconjugate according to embodiment 8, wherein the chelator is DOTA or NOTA or a derivative thereof.
[0177] 11. The immunoconjugate according to embodiment 8, wherein the chelator is H₂bp18c6 or a H₂bp18c6 derivative.
[0178] 12. The immunoconjugate according to embodiment 8, wherein the radiometal complex is a radiocomplex of Formula (I-m), or Formula (II-m), or Formula (III-m) as described herein, wherein R₁₁ comprises the antigen binding domain with binding specificity for kallikrein related peptidase 2 (hK2) and M is the radiometal.
[0179] 13. The immunoconjugate according to embodiment 8, wherein the radiometal complex is a radiometal complex of Formula (IV-m), or Formula (V-m), or Formula (VI-m) as described herein, wherein R₄ comprises the antigen binding domain with binding specificity for kallikrein related peptidase 2 (hK2) and M⁺ is the radiometal.
[0180] 14. The immunoconjugate of embodiment 1, wherein the therapeutic moiety is an auristatin derivative.
[0181] 15. The immunoconjugate of embodiment 14, wherein the therapeutic moiety is MMAE (monomethyl auristatin E).
[0182] 16. The immunoconjugate of embodiment 14, wherein the therapeutic moiety is MMAF (monomethyl auristatin F).
[0183] 17. The immunoconjugate according to any of embodiments 1-16 or 51-56, wherein the antigen binding domain that binds hK2 is a scFv, a (scFv)₂, a Fv, a Fab, a F(ab′)₂, a Fd, a dAb or a VHH.
[0184] 18. The immunoconjugate according to any of embodiments 1-16 or 51-56, wherein the antigen binding domain with binding specificity for hK2 is a Fab.
[0185] 19. The immunoconjugate according to any of embodiments 1-18 or 51-56, wherein the antigen binding domain comprises the HCDR1, the HCDR2, the HCDR3, the LCDR1, the LCDR2 and the LCDR3 of SEQ ID NO: 170 (SYYWS), SEQ ID NO: 171 (YIYYSGSTNYNPSLKS), SEQ ID NO: 172 (TTIFGVVTPNFYYGMDV), SEQ ID NO: 173 (RASQGISSYLA), SEQ ID NO: 174 (AASTLQS) and SEQ ID NO: 175 (QQLNSYPLT), respectively.
[0186] 20. The immunoconjugate according to any of embodiments 1-19 or 51-56, wherein the antigen binding domain that binds hK2 comprises a VH which is at least 80% (e.g. at least 85%, at least 90%, at least 95%, at least 99% or 100%) identical to the VH of SEQ ID NO: 162 (QVQLQESGPGLVKPSETLSLTCTVSGGSISSYYWSWIRQPPGKGLEWIGYIYYSGSTNYNPSL KSRVTISVDTSKNQFSLKLSSVTAADTAVYYCAGTTIFGVVTPNFYYGMDVWGQGTTVTVS S), and a VL which is at least 80% (e.g. at least 85%, at least 90%, at least 95%, at least 99% or 100%) identical to the VL of SEQ ID NO: 163 (DIQMTQSPSFLSASVGDRVTITCRASQGISSYLAWYQQKPGKAPKFLIYAASTLQSGVPSRFS GSGSGTEFTLTISSLQPEDFATYYCQQLNSYPLTFGGGTKVEIK).
[0187] 21. The immunoconjugate according to any of embodiments 1-19 or 51-56, wherein the antigen binding domain that binds hK2 comprises the VH of SEQ ID NO: 162 and the VL of SEQ ID NO: 163.
[0188] 22. The immunoconjugate according to any of embodiments 1-18 or 51-56, wherein the antigen binding domain is a Fab that comprises:
   [0189] a. a HCDR1, a HCDR2, a HCDR3, a LCDR1, a LCDR2 and a LCDR3 of SEQ ID NOs: 170, 171, 172, 173, 174 and 175, respectively; and/or
   [0190] b. a VH of SEQ ID NO: 162 and a VL of SEQ ID NO: 163.
[0191] 23. The immunoconjugate according to any of embodiments 1-22 or 51-56, wherein the immunoconjugate is a short half-life immunoconjugate.
[0192] 24. A method of treating an hK2-expressing cancer in a subject, comprising administering to the subject a therapeutically effective amount of the immunoconjugate according to any of embodiments 1-23 or 51-56.
[0193] 25. A method of reducing the amount of hK2-expressing tumor cells in a subject, comprising administering to the subject a therapeutically effective amount of the immunoconjugate according to any of embodiments 1-23 or 51-56.
[0194] 26. A method of treating prostate cancer in a subject, comprising administering to the subject a therapeutically effective amount of the immunoconjugate according to any of embodiments 1-23 or 51-56.
[0195] 27. The method of embodiment 26, wherein the prostate cancer is relapsed, refractory, malignant or castration resistant prostate cancer, or any combination thereof.
[0196] 28. The method of embodiment 26, wherein the prostate cancer is metastatic castration-resistant prostate cancer.
[0197] 29. A method of detecting the presence of prostate cancer in a subject, comprising administering the immunoconjugate according to any of embodiments 1-23 or 51-56 to a subject suspected to have prostate cancer and visualizing the biological structures to which the conjugate is bound (e.g., by computerized tomography or positron emission tomography), thereby detecting the presence of prostate cancer, wherein the immunoconjugate preferably comprises an imaging agent, such as 111-In or 64-Cu.
[0198] 30. A method of making an immunoconjugate according to any of embodiments 1-23 or 51-56 comprising: conjugating the therapeutic moiety to the antigen binding domain with binding specificity for kallikrein related peptidase 2 (hK2).
[0199] 31. A method of making a radioimmunoconjugate comprising binding a radiometal to a chelator that is conjugated to an antigen binding domain with binding specificity for kallikrein related peptidase 2 (hK2).
[0200] 32. The method of embodiment 31, wherein the chelator is DOTA or NOTA or a derivative thereof.
[0201] 33. The method of embodiment 31, wherein the chelator is H₂bp18c6 or a H₂bp18c6 derivative.
[0202] 34. The method of embodiment 31, wherein the chelator is selected from the group consisting of chelators of Formula (I), Formula (II) and Formula (III) as described herein, wherein R₁₁ comprises the antigen binding domain with binding specificity for kallikrein related peptidase 2 (hK2).
[0203] 35. The method of embodiment 31, wherein the chelator is selected from the group consisting of chelators of Formula (IV), Formula (V) and Formula (VI) as described herein, wherein R₄ comprises the antigen binding domain with binding specificity for kallikrein related peptidase 2 (hK2).
[0204] 36. The method according to any of embodiments 31-35, wherein the antigen binding domain that binds hK2 is a scFv, a (scFv)₂, a Fv, a Fab, a F(ab′)₂, a Fd, a dAb or a VHH.
[0205] 37. The method according to any of embodiments 31-35, wherein the antigen binding domain that binds hK2 is a Fab.
[0206] 38. The method according to any of embodiments 31-37, wherein the antigen binding domain comprises the HCDR1, the HCDR2, the HCDR3, the LCDR1, the LCDR2 and the LCDR3 of SEQ ID NOs: 170, 171, 172, 173, 174 and 175, respectively.
[0207] 39. The method according to any of embodiments 31-38, wherein the antigen binding domain that binds hK2 comprises a VH which is at least 80% (e.g. at least 85%, at least 90%, at least 95%, at least 99% or 100%) identical to the VH of SEQ ID NO: 162 and a VL which is at least 80% (e.g. at least 85%, at least 90%, at least 95%, at least 99% or 100%) identical to the VL of SEQ ID NO: 163.
[0208] 40. The method according to any of embodiments 31-38, wherein the antigen binding domain that binds hK2 comprises the VH of SEQ ID NO: 162 and the VL of SEQ ID NO: 163.
[0209] 41. The method according to any of embodiments 31-37, wherein the antigen binding domain is a Fab that comprises:
   [0210] a. a HCDR1, a HCDR2, a HCDR3, a LCDR1, a LCDR2 and a LCDR3 of SEQ ID NOs: 170, 171, 172, 173, 174 and 175, respectively; and/or
   [0211] b. a VH of SEQ ID NO: 162 and a VL of SEQ ID NO: 163.
[0212] 42. A short half-life radioimmunoconjugate comprising a radiometal complex, wherein the radiometal complex comprises ²²⁵Ac bound to a chelator, and wherein the chelator is conjugated to a Fab with binding specificity for hK2, said Fab comprising: a HCDR1, a HCDR2, a HCDR3, a LCDR1, a LCDR2 and a LCDR3 of SEQ ID NOs: 170, 171, 172, 173, 174 and 175, respectively.
[0213] 43. The short half-life radioimmunoconjugate of embodiment 42, said Fab comprising a VH of SEQ ID NO: 162 and a VL of SEQ ID NO: 163.
[0214] 44. The short half-life radioimmunoconjugate of embodiment 42 or embodiment 43, wherein the chelator is DOTA or NOTA or a derivative thereof.
[0215] 45. The short half-life radioimmunoconjugate of embodiment 42 or embodiment 43, wherein the chelator is H₂bp18c6 or a H₂bp18c6 derivative.
[0216] 46. The short half-life radioimmunoconjugate of embodiment 42 or embodiment 43, wherein the radiometal complex is selected from the group consisting of chelators of Formula (I-m), Formula
[0217] (II-m) and Formula (III-m) as described herein, wherein R₁₁ comprises the Fab with binding specificity for hK2.
[0218] 47. The short half-life radioimmunoconjugate of embodiment 42 or embodiment 43, wherein the radiometal complex is selected from the group consisting of chelators of Formula (IV-m), Formula (V-m) and Formula (VI-m) as described herein, wherein R₄ comprises the Fab with binding specificity for hK2.
[0219] 48. The method according to any of embodiments 31-37 further comprising conjugating the chelator to the antigen binding domain with binding specificity for kallikrein related peptidase 2 (hK2) prior to binding the radiometal to the chelator.
[0220] 49. The method according to embodiment 48, wherein the chelator has the structure of

[chemical structure]

prior to conjugating the chelator to the antigen binding domain.
[0221] 50. The method according to embodiment 48, wherein the chelator has the structure of

[chemical structure]

prior to conjugating the chelator to the antigen binding domain.
[0222] 51. The immunoconjugate according to embodiment 8, wherein the radiometal complex is a radiometal complex of Formula (I-m),
   [0223] wherein the radiometal complex of Formula (I-m) has the following structure:

[chemical structure]

[0224] wherein:
   [0225] M is the radiometal, preferably an alpha-emitting radiometal ion, and more preferably actinium-225 (²²⁵Ac);
   [0226] each of ring A and ring B is independently a 6-10 membered aryl or a 5-10 membered heteroaryl, wherein each of ring A and ring B is optionally substituted with one or more substituents independently selected from the group consisting of halo, alkyl, alkenyl, cycloalkyl, cycloalkenyl, aryl, heterocyclyl, heteroaryl, —OR₁₃, —SR₁₃,, —(CH₂)ₚCOOR₁₃, —OC(O)R₁₃, —N(R₁₃)₂, —CON(R₁₃)₂, —NO₂, —CN—OC(O)N(R₁₃)₂, and X;
   [0227] each of Z₁ and Z₂ is independently —(C(R₁₂)₂)ₘ—or —(CH₂)ₙ—C(R₁₂)(X)—(CH₂)ₙ—;
   [0228] each X is independently —L₁-R₁₁;
   [0229] each n is independently 0, 1, 2, 3, 4, or 5;
   [0230] each m is independently 1, 2, 3, 4, or 5;
   [0231] each p is independently 0 or 1;
   [0232] L₁is absent or a linker;
   [0233] R₁₁ comprises the antigen binding domain with binding specificity for kallikrein related peptidase 2 (hK2);
   [0234] each R₁₂ is independently hydrogen, alkyl, cycloalkyl, aryl, heterocyclyl, or heteroaryl;
   [0235] each R₁₃ is independently hydrogen or alkyl;
   [0236] each of R₁₄, R₁₅, R₁₆, and R₁₇ is independently hydrogen, alkyl, or X,
   [0237] or alternatively R₁₄ and R₁₅ and/or R₁₆ and R₁₇ are taken together with the carbon atoms to which they are attached to form a 5- or 6-membered cycloalkyl ring optionally substituted with X; provided that the radiometal complex comprises at least one X, and when X is present on ring A or ring B, L₁ is a linker or at least one of R₁₂ and R₁₄—R₁₇ is not hydrogen.
[0238] 52. The immunoconjugate according to embodiment 8, wherein the radiometal complex is a radiometal complex of Formula (II-m),
   [0239] wherein the radiometal complex of Formula (II-m) has the following structure:

[chemical structure]

[0240] wherein:
   [0241] M is the radiometal, preferably an alpha-emitting radiometal ion, and more preferably actinium-225 (²²⁵Ac);
   [0242] A₁ is N or CR₁ or is absent;
   [0243] A₂ is N or CR₂;
   [0244] A₃ is N or CR₃;
   [0245] A₄ is N or CR₄;
   [0246] A₅ is N or CR₅;
   [0247] A₆ is N or CR₆ or is absent;
   [0248] A₇ is N or CR₇;
   [0249] A₈ is N or CR₈;
   [0250] A₉ is N or CR₉;
   [0251] A₁₀ is N or CR₁₀;
[0252] provided that no more than three of A₁, A₂, A₃, A₄, and A₅ are N, and no more than three of A₆, A₇, A₈, A₉, and A₁₀ are N;
   [0253] each of R₁, R₂, R₃, R₄, R₅, R₆, R₇, R₈, R₉, and R₁₀ is independently selected from the group consisting of hydrogen, halo, alkyl, alkenyl, cycloalkyl, cycloalkenyl, aryl, heterocyclyl, heteroaryl, —OR₁₃, —SR₁₃, —(CH₂)ₚCOOR₁₃, —OC(O)R₁₃, —N(R₁₃)₂, —CON(R₁₃)₂, —NO₂, —CN—OC(O)N(R₁₃)₂, and —X,
   [0254] or, alternatively, any two directly adjacent R₁, R₂, R₃, R₄, R₅, R₆, R₇, R₈, R₉, and R₁₀ are taken together with the atoms to which they are attached to form a five or six-membered substituted or unsubstituted carbocyclic or nitrogen-containing ring;
   [0255] each of Z₁ and Z₂ is independently —(C(R₁₂)₂)ₘ—or —(CH₂)ₙ—C(R₁₂)(X)—(CH₂)ₙ—;
   [0256] each X is independently —L₁-R₁₁;
   [0257] each n is independently 0, 1, 2, 3, 4, or 5;
   [0258] each m is independently 1, 2, 3, 4, or 5;
   [0259] each p is independently 0 or 1;
   [0260] L₁ is absent or a linker;
   [0261] R₁₁ comprises the antigen binding domain with binding specificity for kallikrein related peptidase 2 (hK2);
   [0262] each R₁₂ is independently hydrogen, alkyl, cycloalkyl, aryl, heterocyclyl, or heteroaryl;
   [0263] each R₁₃ is independently hydrogen or alkyl;
   [0264] each of R₁₄, R₁₅, R₁₆, and R₁₇ is independently hydrogen, alkyl, or X,
   [0265] or alternatively R₁₄ and R₁₅ and/or R₁₆ and R₁₇ are taken together with the carbon atoms to which they are attached to form a 5- or 6-membered cycloalkyl ring optionally substituted with X;
   [0266] provided that the radiometal complex comprises at least one X, and when any one of R₁, R₂, R₃, R₄, R₅, R₆, R₇, R₈, R₉, and R₁₀ is X, then L₁ is a linker or at least one of R₁₂ and R₁₄—R₁₇ is not hydrogen.
[0267] 53. The immunoconjugate according to embodiment 8, wherein the radiometal complex is a radiometal complex of Formula (III-m),
   [0268] wherein the radiometal complex of Formula (III-m) has the following structure:

[chemical structure]

[0269] wherein:
   [0270] M is the radiometal, preferably an alpha-emitting radiometal ion, and more preferably actinium-225 (²²⁵Ac);
   [0271] each A₁₁ is independently O, S, NMe, or NH;
   [0272] each of Z₁ and Z₂ is independently —(C(R₁₂)₂)ₘ—or —(CH₂)ₙ—C(R₁₂)(X)—(CH₂)ₙ—;
   [0273] each X is independently —L₁-R₁₁;
   [0274] each n is independently 0, 1, 2, 3, 4, or 5;
   [0275] each m is independently 1, 2, 3, 4, or 5;
   [0276] each p is independently 0 or 1;
   [0277] L₁is absent or a linker;
   [0278] R₁₁ comprises the antigen binding domain with binding specificity for kallikrein related peptidase 2 (hK2);
   [0279] each R₁₂ is independently hydrogen, alkyl, cycloalkyl, aryl, heterocyclyl, or heteroaryl;
   [0280] each R₁₃ is independently hydrogen or alkyl;
   [0281] each of R₁₄, R₁₅, R₁₆, and R₁₇ is independently hydrogen, alkyl, or X,
   [0282] or alternatively R₁₄ and R₁₅ and/or R₁₆ and R₁₇ are taken together with the carbon atoms to which they are attached to form a 5- or 6-membered cycloalkyl ring optionally substituted with X; and
   [0283] each R₁₈ is independently selected from the group consisting of hydrogen, halo, alkyl, alkenyl, cycloalkyl, cycloalkenyl, aryl, heterocyclyl, heteroaryl, —OR₁₃, —SR₁₃,, —(CH₂)ₚCOOR₁₃, —OC(O)R₁₃, —N(R₁₃)₂, —CON(R₁₃)₂, —NO₂, —CN—OC(O)N(R₁₃)₂, and —X,
   [0284] provided that the radiometal complex comprises at least one X, and when R₁₈ is X, then L₁ is a linker or at least one of R₁₂ and R₁₄—R₁₇ is not hydrogen.
[0285] 54. The immunoconjugate according to embodiment 8, wherein the radiometal complex is a radiometal complex of Formula (IV-m),
[0286] wherein the radiometal complex of Formula (IV-m) has the following structure:

[chemical structure]

[0287] or a pharmaceutically acceptable salt thereof, wherein:
   [0288] M⁺ is the radiometal, preferably selected from the group consisting of actinium-225(²²⁵Ac), radium-223 (²³³Ra), bismuth-213 (²¹³Bi), lead-212 (²¹²Pb(II) and/or ²¹²Pb(IV)), terbium-149 (¹⁴⁹Tb), terbium-152 (¹⁵²Tb), terbium-155 (¹⁵⁵Tb),fermium-255 (²⁵⁵Fm), thorium-227 (²²⁷Th), thorium-226 (²²⁶Th⁴⁺), astatine-211 (²¹¹At), cerium-134 (³⁴Ce), neodymium-144 (¹⁴⁴Nd), lanthanum-132 (¹³²La), lanthanum-135 (¹³⁵La) and uranium-230 (²³⁰U);
   [0289] R₁ is hydrogen and R₂ is —L₁-R₄;
   [0290] alternatively, R₁ is —L₁-R₄ and R₂ is hydrogen;
   [0291] R₃ is hydrogen;
   [0292] alternatively, R₂ and R₅ are taken together with the carbon atoms to which they are attached to form a 5- or 6-membered cycloalkyl, wherein the 5- or 6-membered cycloalkyl is optionally substituted with-L₁-R₄;
   [0293] L₁ is absent or a linker;
   [0294] R₄ comprises the antigen binding domain with binding specificity for kallikrein related peptidase 2 (hK2).
[0295] 55. The immunoconjugate according to embodiment 8, wherein the radiometal complex is a radiometal complex of Formula (V-m),
   [0296] wherein the radiometal complex of Formula (V-m) has the following structure:

[chemical structure]

[0297] or a pharmaceutically acceptable salt thereof, wherein:
   [0298] M⁺ is the radiometal, preferably selected from the group consisting of actinium-225 (²²⁵Ac), radium-223 (²³³Ra), bismuth-213 (²¹³Bi), lead-212 (²¹²Pb(II) and/or ²¹²Pb(IV)), terbium-149 (¹⁴⁹Tb), terbium-152 (¹⁵²Tb), terbium-155 (¹⁵⁵Tb),fermium-255 (²⁵⁵Fm), thorium-227 (²²⁷Th), thorium-226 (²²⁶Th⁴⁺), astatine-211 (²¹¹At), cerium-134 (³⁴Ce), neodymium-144 (¹⁴⁴Nd), lanthanum-132 (¹³²La), lanthanum-135 (¹³⁵La) and uranium-230 (²³⁰U);
   [0299] L₁is absent or a linker;
   [0300] R₄ comprises the antigen binding domain with binding specificity for kallikrein related peptidase 2 (hK2).
[0301] 56. The immunoconjugate according to embodiment 8, wherein the radiometal complex is a radiometal complex of Formula (VI-m),
   [0302] wherein the radiometal complex of Formula (VI-m) has the following structure:

[chemical structure]

[0303] or a pharmaceutically acceptable salt thereof, wherein:
   [0304] M⁺ is the radiometal, preferably selected from the group consisting of actinium-225 (²²⁵Ac), radium-223 (²³³Ra), bismuth-213 (²¹³Bi), lead-212 (²¹²Pb(II) and/or ²¹²Pb(IV)), terbium-149 (¹⁴⁹Tb), terbium-152 (¹⁵²Tb), terbium-155 (¹⁵⁵Tb),fermium-255 (²⁵⁵Fm), thorium-227 (²²⁷Th), thorium-226 (²²⁶Th4), astatine-211 (²¹¹At), cerium-134 (³⁴Ce), neodymium-144 (¹⁴⁴Nd), lanthanum-132 (¹³²La), lanthanum-135 (¹³⁵La) and uranium-230 (²³⁰U);
   [0305] L₁ is absent or a linker; and
   [0306] R₄ comprises the antigen binding domain with binding specificity for kallikrein related peptidase 2 (hK2).
[0307] 57. An immunoconjugate comprising: a therapeutic moiety conjugated to an antigen binding domain with binding specificity for kallikrein related peptidase 2 (hK2), wherein the antigen binding domain comprises the HCDR1, the HCDR2, the HCDR3, the LCDR1, the LCDR2 and the LCDR3 of SEQ ID NO: 170 (SYYWS), SEQ ID NO: 171 (YIYYSGSTNYNPSLKS), SEQ ID NO: 172 (TTIFGVVTPNFYYGMDV), SEQ ID NO: 173 (RASQGISSYLA), SEQ ID NO: 174 (AASTLQS) and SEQ ID NO: 175 (QQLNSYPLT), respectively.
[0308] 58. The immunoconjugate of embodiment 57, wherein the antigen binding domain that binds hK2 comprises a VH which is at least 80% (e.g. at least 85%, at least 90%, at least 95%, at least 99% or 100%) identical to the VH of SEQ ID NO: 162 (QVQLQESGPGLVKPSETLSLTCTVSGGSISSYYWSWIRQPPGKGLEWIGYIYYSGSTNYNPSL KSRVTISVDTSKNQFSLKLSSVTAADTAVYYCAGTTIFGVVTPNFYYGMDVWGQGTTVTVS S), and a VL which is at least 80% (e.g. at least 85%, at least 90%, at least 95%, at least 99% or 100%) identical to the VL of SEQ ID NO: 163 (DIQMTQSPSFLSASVGDRVTITCRASQGISSYLAWYQQKPGKAPKFLIYAASTLQSGVPSRFS GSGSGTEFTLTISSLQPEDFATYYCQQLNSYPLTFGGGTKVEIK).
[0309] 59. The immunoconjugate according to embodiment 57, wherein the antigen binding domain that binds hK2 comprises the VH of SEQ ID NO: 162 and the VL of SEQ ID NO: 163.
[0310] 60. The immunoconjugate according to any of embodiments 57-59, wherein the therapeutic moiety is a cytotoxic agent.
[0311] 61. The immunoconjugate according to any of embodiments 57-59, wherein the therapeutic moiety is an imaging agent.
[0312] 62. The immunoconjugate according to any of embodiments 57-59, wherein the therapeutic moiety comprises a radiometal.
[0313] 63. The immunoconjugate of embodiment 62, wherein the radiometal is selected from the group consisting of ²²⁵Ac, ¹⁷⁷Lu, ³²P, ⁴⁷Sc, ⁶⁷Cu, ⁷⁷As, ⁸⁹Sr, ⁹⁰Y, ⁹⁹Tc, ¹⁰⁵Rh, ¹⁰⁹Pd, ¹¹¹Ag, ¹³¹I, ¹⁴⁹Tb, ¹⁵²Tb, ¹⁵⁵Tb, ¹⁵³Sm, ¹⁵⁹Gd, ¹⁶⁵Dy, ¹⁶⁶Ho, ¹⁶⁹Er, ¹⁸⁶Re, ¹⁸⁸Re, ¹⁹⁴Ir, ¹⁹⁸Au, ¹⁹⁹Au, ²¹¹At, ²¹²Pb, ²¹²Bi, ²¹³Bi, ²²³Ra, ²⁵⁵Fm, ²²⁷Th, ¹⁷⁷Lu, ⁶²Cu, ⁶⁴Cu, ⁶⁷Ga, ⁶⁸Ga, ⁸⁶Y, ⁸⁹Zr, and ¹¹¹In.
[0314] 64. The immunoconjugate according to any of embodiments 57-59, wherein the therapeutic moiety is a cytotoxic agent comprising ²²⁵Ac.
[0315] 65. The immunoconjugate according to any of embodiments 57-59, wherein the therapeutic moiety is an imaging agent comprising ¹¹¹In or ⁶⁴Cu.
[0316] 66. The immunoconjugate according to any of embodiments 62-65, wherein the therapeutic moiety comprises a radiometal complex, wherein the radiometal complex comprises the radiometal bound to a chelator, and wherein the chelator is conjugated to the antigen binding domain with binding specificity for kallikrein related peptidase 2 (hK2).
[0317] 67. The immunoconjugate according to embodiment 66, wherein the chelator is 1,4,7,10-tetraazacyclododecane-1,4,7,10, tetraacetic acid (DOTA), S-2-(4-isothiocyanatobenzyl)-1,4,7-triazacyclononane-1,4,7-triacetic acid (NOTA), 1,4,8,11-tetraazacyclodocedan-1,4,8,11-tetraacetic acid (TETA), 3,6,9,15-tetraazabicyclo[9.3.1]-pentadeca-1 (15),11,13-triene-4-(S)-(4-isothiocyanatobenzyl)-3,6,9-triacetic acid (PCTA), 5-S-(4-aminobenzyl)-1-oxa-4,7,10-triazacyclododecane-4,7,10-tris(acetic acid) (DO3A), or a derivative thereof.
[0318] 68. The immunoconjugate according to embodiment 66, wherein the chelator is DOTA or NOTA or a derivative thereof.
[0319] 69. The immunoconjugate according to embodiment 66, wherein the chelator is H₂bp18c6 or a H₂bp18c6 derivative.
[0320] 70. The immunoconjugate according to embodiment 66, wherein the radiometal complex is a radiocomplex of Formula (I-m), or Formula (II-m), or Formula (III-m) as described herein, wherein R₁₁ comprises the antigen binding domain with binding specificity for kallikrein related peptidase 2 (hK2) and M is the radiometal.
[0321] 71. The immunoconjugate according to embodiment 66, wherein the radiometal complex is a radiometal complex of Formula (IV-m), or Formula (V-m), or Formula (VI-m) as described herein, wherein R₄ comprises the antigen binding domain with binding specificity for kallikrein related peptidase 2 (hK2) and M⁺ is the radiometal.
[0322] 72. The immunoconjugate according to any of embodiments 57-71, wherein the antigen binding domain with binding specificity for hK2 is a Fab.

### Chelators

[0323] According to particular embodiments, the present invention relates to immunoconjugates, such as radioimmunoconjugates, comprising a chelator, preferably a chelator to which radiometals can be chelated via coordinate bonding. According to particular embodiments, chelators of the invention refer to a chelator to which a metal, preferably a radiometal, can be complexed to form a radiometal complex. Preferably, the chelator is a macrocyclic compound. In certain embodiments, a chelator comprises a macrocycle or a macrocyclic ring containing one or more heteroatoms, e.g., oxygen and/or nitrogen as ring atoms.

[0324] According to particular embodiments, the chelator comprises a macrocyclic chelating moiety. Examples of macrocyclic chelating moieties include, without limitation, 1,4,7,10-tetraazacyclododecane-1,4,7,10, tetraacetic acid (DOTA), S-2-(4-isothiocyanatobenzyl)-1,4,7-triazacyclononane-1,4,7-triacetic acid (NOTA), 1,4,8,11-tetraazacyclodocedan-1,4,8,11-tetraacetic acid (TETA), 3,6,9,15-tetraazabicyclo[9.3.1]-pentadeca-1 (15),11,13-triene-4-(S)-(4-isothiocyanatobenzyl)-3,6,9-triacetic acid (PCTA), 5-S-(4-aminobenzyl)-1-oxa-4,7,10-triazacyclododecane-4,7,10-tris(acetic acid) (DO3A), or a derivative thereof. In some aspects, the chelator is 1,4,7,10-tetraazacyclododecane-1,4,7,10, tetraacetic acid (DOTA). In other aspects, the chelator is S-2-(4-isothiocyanatobenzyl)-1,4,7-triazacyclononane-1,4,7-triacetic acid (NOTA). In further aspects, the chelator is 1,4,8,11-tetraazacyclodocedan-1,4,8,11-tetraacetic acid (TETA). In yet other aspects, the chelator is 3,6,9,15-tetraazabicyclo[9.3.1]-pentadeca-1(15),11,13-triene-4-(S)-(4-isothiocyanatobenzyl)-3,6,9-triacetic acid (PCTA). In still further aspects, the chelator is 5-S-(4-aminobenzyl)-1-oxa-4,7,10-triazacyclododecane-4,7,10-tris(acetic acid) (DO3A). In other aspects, the chelator is DOTA, DFO, DTPA, NOTA, or TETA.

[0325] In certain embodiments the chelator comprises NOTA or a derivative thereof.

[0326] In certain embodiments, the chelator comprises a macrocycle that is a derivative of 4,13-diaza-18-crown-6. 4,13-Diaza-18-crown-6 may be prepared in a variety of ways (See, e.g., Gatto et al., Org. Synth. 1990, 68, 227; DOI: 10.15227/orgsyn.068.0227). According to further embodiments of the present invention, the chelator is H₂bp18c6 or a H₂bp18c6 derivative, such as those described in WO2020/229974. H₂bp18c6 refers to N,N′-bis [(6-carboxy-2-pyridil)methyl]-4,13-diaza-18-crown-6, as described herein. H₂bp18c6 and H₂bp18c6 derivatives are also described, for example, in Thiele et al. “An Eighteen-Membered Macrocyclic Ligand for Actinium-225 Targeted Alpha Therapy” Angew. Chem. Int. Ed. (2017) 56, 14712-14717, and Roca-Sabio et al. “Macrocyclic Receptor Exhibiting Unprecedented Selectivity for Light Lanthanides” J. Am. Chem. Soc. (2009) 131, 3331-3341, which are incorporated by reference herein. Additional chelators suitable for use in accordance with the present invention are described in WO2018/183906 and WO2020/106886, which are incorporated by reference herein. As used herein, the term “TOPA” refers to the macrocycle known in the art as H₂bp18c6 and may alternatively be referred to as N,N′-bis [(6-carboxy-2-pyridil)methyl]-4,13-diaza-18-crown-6 (see, e.g., Roca-Sabio et al.).

### CHELATORS OF FORMULAE (I), (II) and (III)

[0327] Additional chelators suitable for use in accordance with the present invention are described in WO2020/229974, which is incorporated by reference herein. According to particular embodiments, e.g., as described in WO2020/229974, the chelator has the structure of Formula (I):

[chemical structure]

wherein;
[0328] each of ring A and ring B is independently a 6-10 membered aryl or a 5-10 membered heteroaryl, wherein each of ring A and ring B is optionally substituted with one or more substituents independently selected from the group consisting of halo, alkyl, alkenyl, cycloalkyl, cycloalkenyl, aryl, heterocyclyl, heteroaryl, —OR₁₃, —SR₁₃,, —(CH₂)ₚCOOR₁₃, —OC(O)R₁₃, —N(R₁₃)₂, —CON(R₁₃)₂, —NO₂, —CN—OC(O)N(R₁₃)₂, and X;
[0329] each of Z₁ and Z₂ is independently —(C(R₁₂)₂)ₘ—or —(CH₂)ₙ—C(R₁₂)(X)—(CH₂)ₙ—;
[0330] each X is independently —L₁-R₁₁;
[0331] each n is independently 0, 1, 2, 3, 4, or 5;
[0332] each m is independently 1, 2, 3, 4, or 5;
[0333] each p is independently 0 or 1;
[0334] L₁ is absent or a linker;
[0335] R₁₁ is a nucleophilic moiety or an electrophilic moiety, or R₁₁ comprises an antigen binding domain;
[0336] each R₁₂ is independently hydrogen, alkyl, cycloalkyl, aryl, heterocyclyl, or heteroaryl;
[0337] each R₁₃ is independently hydrogen or alkyl;
[0338] each of R₁₄, R₁₅, R₁₆, and R₁₇ is independently hydrogen, alkyl, or X,
[0339] or alternatively R₁₄ and R₁₅ and/or R₁₆ and R₁₇ are taken together with the carbon atoms to which they are attached to form a 5- or 6-membered cycloalkyl ring optionally substituted with X;
[0340] provided that the chelator comprises at least one X, and when X is present on ring A or ring B, L₁ is a linker or at least one of R₁₂ and R₁₄—R₁₇ is not hydrogen. According to embodiments of the invention, a chelator comprises at least one X group, wherein X is —L₁-R₁₁, wherein L₁ is absent or a linker, and R₁₁ is an electrophilic moiety or a nucleophilic moiety, or R₁₁ comprises an antigen binding domain. When R₁₁ is a nucleophilic or electrophilic moiety, such moiety can be used for attachment of the chelator to an antigen binding domain, directly or indirectly via a linker. According to preferred embodiments, R₁₁ comprises an antibody or antigen binding domain with binding specificity for hK2, such as the Fab of KL2B30.

[0341] In certain embodiments, a chelator comprises a single X group, and preferably L₁ of the X group is a linker.

[0342] A chelator of the invention can be substituted with X at any one of the carbon atoms of the macrocyclic ring, the Z₁ or Z₂ position, or on ring A or ring B, provided that when ring or ring B comprises an X group, L₁ is a linker or at least one of R₁₂ and R₁₄—R₁₇ is not hydrogen (i.e., at least one of the carbon atoms of Z₁, Z₂, and/or the carbons of the macrocyclic ring is substituted for instance with an alkyl group, such as methyl or ethyl). Preferably, substitution at such positions does not affect the chelation efficiency of the chelator for radiometal ions, particularly ²²⁵Ac, and in some embodiments, the substitutions can enhance chelation efficiency.

[0343] In some embodiments, L₁ is absent. When L₁ is absent, R₁₁ is directly bound (e.g., via covalent linkage) to the chelator.

[0344] In some embodiments, L₁ is a linker. As used herein, the term “linker” refers to a chemical moiety that joins a chelator to a nucleophilic moiety, electrophilic moiety, or antigen binding domain. Any suitable linker known to those skilled in the art in view of the present disclosure can be used in the invention. The linkers can contain, for example, a substituted or unsubstituted alkyl, a substituted or unsubstituted heteroalkyl moiety, a substituted or unsubstituted aryl or heteroaryl, a polyethylene glycol (PEG) linker, a peptide linker, a sugar-based linker, or a cleavable linker, such as a disulfide linkage or a protease cleavage site such as valine-citrulline-p-aminobenzyl (PAB). Exemplary linker structures suitable for use in the invention include, but are not limited to:

[chemical structure]

wherein n is an integer of 0 to 10, preferably an integer of 1 to 4; and m is an integer of 0 to 12, preferably an integer of 0 to 6.

[0345] In some embodiments, R₁₁ is a nucleophilic moiety or an electrophilic moiety. A “nucleophilic moiety” or “nucleophilic group” refers to a functional group that donates an electron pair to form a covalent bond in a chemical reaction. An “electrophilic moiety” or “electrophilic group” refers to a functional group that accepts an electron pair to form a covalent bond in a chemical reaction. Nucleophilic groups react with electrophilic groups, and vice versa, in chemical reactions to form new covalent bonds. Reaction of the nucleophilic group or electrophilic group of a chelator of the invention with an antigen binding domain or other chemical moiety (e.g., linker) comprising the corresponding reaction partner allows for covalent linkage of the antigen binding domain or chemical moiety to the chelator of the invention.

[0346] Exemplary examples of nucleophilic groups include, but are not limited to, azides, amines, and thiols. Exemplary examples of electrophilic groups include, but are not limited to amine-reactive groups, thiol-reactive groups, alkynyls and cycloalkynyls. An amine-reactive group preferably reacts with primary amines, including primary amines that exist at the N-terminus of each polypeptide chain and in the side-chain of lysine residues. Examples of amine-reactive groups suitable for use in the invention include, but are not limited to, N-hydroxy succinimide (NHS), substituted NHS (such as sulfo-NHS), isothiocyanate (—NCS), isocyanate (—NCO), esters, carboxylic acid, acyl halides, amides, alkylamides, and tetra- and per-fluoro phenyl ester. A thiol-reactive group reacts with thiols, or sulfhydryls, preferably thiols present in the side-chain of cysteine residues of polypeptides. Examples of thiol-reactive groups suitable for use in the invention include, but are not limited to, Michael acceptors (e.g., maleimide), haloacetyl, acyl halides, activated disulfides, and phenyloxadiazole sulfone.

[0347] In particular embodiments, R₁₁ is —NH₂, —NCS (isothiocyanate), —NCO (isocyanate), —N₃ (azido), alkynyl, cycloalkynyl, carboxylic acid, ester, amido, alkylamide, maleimido, acyl halide, tetrazine, or trans-cyclooctene, more particularly-NCS, —NCO, —N₃, alkynyl, cycloalkynyl, —C(O)R₁₃, —COOR₁₃, —CON(R₁₃)₂, maleimido, acyl halide (e.g., —C(O)Cl, —C(O)Br), tetrazine, or trans-cyclooctene wherein each R₁₃ is independently hydrogen or alkyl.

[0348] In some embodiments, R₁₁ is an alkynyl, cycloalkynyl, or azido group thus allowing for attachment of the chelator to an antigen binding domain or other chemical moiety (e.g., linker) using a click chemistry reaction. In such embodiments, the click chemistry reaction that can be performed is a Huisgen cycloaddition or 1,3-dipolar cycloaddition between an azido (—N₃) and an alkynyl or cycloalkynyl group to form a 1,2,4-triazole linker or moiety. In one embodiment, the chelator comprises an alkynyl or cycloalkynyl group and the antigen binding domain or other chemical moiety comprises an azido group. In another embodiment, the chelator comprises an azido group and the antigen binding domain or other chemical moiety comprises an alkynyl or cycloalkynyl group.

[0349] In certain embodiments, R₁₁ is an alkynyl group, more preferably a terminal alkynyl group or cycloalkynyl group that is reactive with an azide group, particularly via strain-promoted azide-alkyne cycloaddition (SPAAC). Examples of cycloalkynyl groups that can react with azide groups via SPAAC include, but are not limited to cyclooctynyl or a bicyclononynyl (BCN), difluorinated cyclooctynyl (DIFO), dibenzocyclooctynyl (DIBO), keto-DIBO, biarylazacyclooctynonyl (BARAC), dibenzoazacyclooctynyl (DIBAC, DBCO, ADIBO), dimethoxyazacyclooctynyl (DIMAC), difluorobenzocyclooctynyl (DIFBO), monobenzocyclooctynyl (MOBO), and tetramethoxy dibenzocyclooctynyl (TMDIBO).

[0350] In a particular embodiment, R₁₁ is dibenzoazacyclooctynyl (DIBAC, DBCO, ADIBO), which has the following structure:

[chemical structure]

In such embodiments in which Ru is DBCO, the DBCO can be covalently linked to a chelator directly or indirectly via a linker, and is preferably attached to the chelator indirectly via a linker.

[0351] In some embodiments, R₁₁ comprises an antigen binding domain. The antigen binding domain can be linked to the chelator directly via a covalent linkage, or indirectly via a linker. In preferred embodiments, the antigen binding domain is an antibody or antigen binding fragment thereof. According to preferred embodiments, R₁₁ comprises an antigen binding domain with binding specificity for hK2, such as the Fab of KL2B30.

[0352] According to embodiments of the invention, each of ring A and ring B is independently a 6-10 membered aryl or a 5-10 membered heteroaryl. In alternative embodiments, it is contemplated that each of ring A and ring B is an optionally substituted heterocyclyl ring, such as oxazoline. Each of ring A and ring B can be optionally and independently substituted with one or more substituent groups independently selected from the group consisting of halo, alkyl, alkenyl, cycloalkyl, cycloalkenyl, aryl, heterocyclyl, heteroaryl, —OR₁₃, —SR₁₃, —(CH₂)ₚCOOR₁₃, —OC(O)R₁₃, —N(R₁₃)₂, —CON(R₁₃)₂, —NO₂, —CN—OC(O)N(R₁₃)₂, and X. Examples of 6-10 membered aryl groups suitable for this purpose include, but are not limited to, phenyl and naphthyl. Examples of 5 to 10 membered heteroaryl groups suitable for this purpose include, but are not limited to pyridinyl, thiazolyl, isothiazolyl, oxazolyl, isoxazolyl, and imidazolyl. Examples of suitable substituents of the 5 to 10 membered heteroaryl and 6 to 10 membered aryl groups include, but are not limited to —COOH, tetrazolyl, and —CH₂COOH. In preferred embodiments, a substituent group is —COOH or tetrazolyl, which is an isostere of —COOH.

[0353] In certain embodiments, each of ring A and ring B are independently and optionally substituted with one or more carboxyl groups, including but not limited to, —COOH and —CH₂COOH.

[0354] In certain embodiments, each of ring A and ring B are independently and optionally substituted with tetrazolyl.

[0355] In one embodiment, ring A and ring B are the same, e.g., both ring A and ring B are pyridinyl. In another embodiment, ring A and ring B are different, e.g., one of ring A and ring is pyridinyl and the other is phenyl.

[0356] In a particular embodiment, both ring A and ring B are pyridinyl substituted with-COOH.

[0357] In a particular embodiment, both ring A and ring B are pyridinyl substituted with tetrazolyl.

[0358] In another particular embodiment, both ring A and ring B are picolinic acid groups having the following structure:

[chemical structure]

[0359] According to embodiments of the invention, each of Z₁ and Z₂ is independently-(C(R₁₂)₂)ₘ—or —(CH₂)ₙ—C(R₁₂)(X)—(CH₂)ₙ—; each X is independently —L₁-R₁₁; each R₁₂ is independently hydrogen, alkyl, cycloalkyl, aryl, heterocyclyl, or heteroaryl; each n is independently 0, 1, 2, 3, 4, or 5; and each m is independently 1, 2, 3, 4, or 5.

[0360] In some embodiments, each R₁₂ is independently hydrogen or alkyl, more preferably hydrogen, —CH₃, or —CH₂CH₃.

[0361] In some embodiments, each R₁₂ is hydrogen.

[0362] In some embodiments, both Z₁ and Z₂ are-(CH₂)ₘ—, wherein each m is preferably 1. In such embodiments, a carbon atom of the macrocyclic ring, ring A, or ring B is substituted with an X group.

[0363] In some embodiments, one of Z₁ and Z₂ is —(CH₂)ₙ—C(R₁₂)(X)—(CH₂)ₙ—and the other is —(CH₂)ₘ—.

[0364] In some embodiments, one of Z₁ and Z₂—(CH₂)ₙ—C(R₁₂)(X)—(CH₂)ₙ—and the other is —(CH₂)ₘ—; each n is 0; m is 1; X is —L₁-R₁₁; and L₁ is a linker.

[0365] In some embodiments, both Z₁ and Z₂ are-(CH₂)ₘ—; each m is independently 0, 1, 2, 3, 4, or 5, preferably each m is 1; and one of R₁₄, R₁₅, R₁₆, and R₁₇ is X, and the rest of R₁₄, R₁₅, R₁₆, and R₁₇ are each hydrogen.

[0366] In some embodiments, R₁₄ and R₁₅ are taken together with the carbon atoms to which they are attached to form a 5- or 6-membered cycloalkyl ring (i.e., cyclopentyl or cyclohexyl). Such 5- or 6-membered cycloalkyl ring can be substituted with an X group.

[0367] In some embodiments R₁₆ and R₁₇ are taken together with the carbon atoms to which they are attached to form a 5- or 6-membered cycloalkyl ring (i.e., cyclopentyl or cyclohexyl). Such 5- or 6-membered cycloalkyl ring can be substituted with an X group.

[0368] In certain embodiments, a chelator has the structure of Formula (II):

[chemical structure]

[0369] wherein:
   [0370] A₁ is N or CR₁ or is absent;
   [0371] A₂ is N or CR₂;
   [0372] A₃ is N or CR₃;
   [0373] A₄ is N or CR₄;
   [0374] A₅ is N or CR₅;
   [0375] A₆ is N or CR₆ or is absent;
   [0376] A₇ is N or CR₇;
   [0377] A₈ is N or CR₈;
   [0378] A₉ is N or CR₉;
   [0379] A₁₀ is N or CR₁₀;
[0380] provided that no more than three of A₁, A₂, A₃, A₄, and As are N, and no more than three of A₆, A₇, A₈, A₉, and A₁₀ are N;
   [0381] each of R₁, R₂, R₃, R₄, R₅, R₆, R₇, R₈, R₉, and R₁₀ is independently selected from the group consisting of hydrogen, halo, alkyl, alkenyl, cycloalkyl, cycloalkenyl, aryl, heterocyclyl, heteroaryl, —OR₁₃, —SR₁₃, —(CH₂)ₚCOOR₁₃, —OC(O)R₁₃, —N(R₁₃)₂, —CON(R₁₃)₂, —NO₂, —CN, —OC(O)N(R₁₃)₂, and —X,
   [0382] or, alternatively, any two directly adjacent R₁, R₂, R₃, R₄, R₅, R₆, R₇, R₈, R₉, and R₁₀ are taken together with the atoms to which they are attached to form a five or six-membered substituted or unsubstituted carbocyclic or nitrogen-containing ring;
   [0383] and Z₁, Z₂, X, n, m, p, L₁, and R₁₁—R₁₇ are as described above for formula (I), provided that the chelator comprises at least one X, and when any one of R₁, R₂, R₃, R₄, R₅, R₆, R₇, R₈, R₉, and R₁₀ is X, then L₁ is a linker or at least one of R₁₂ and R₁₄—R₁₇ is not hydrogen.

[0384] In some embodiments, any two directly adjacent R₁, R₂, R₃, R₄, R₅, R₆, R₇, R₈, R₉, and R₁₀ are taken together with the atoms to which they are attached to form a five or six-membered substituted or unsubstituted carbocyclic or nitrogen-containing ring. Examples of such carbocyclic rings that can be formed include, but are not limited to, naphthyl. Examples of such nitrogen-containing rings that can be formed include, but are not limited to, quinolinyl. The carbocyclic or nitrogen-containing rings can be unsubstituted or substituted with one or more suitable substituents, e.g., —COOH, —CH₂COOH, tetrazolyl etc.

[0385] In some embodiments, L₁ is absent. When L₁ is absent, R₁₁ is directly bound (e.g., via covalent linkage) to the chelator.

[0386] In some embodiments, L₁ is a linker. Any suitable linker known to those skilled in the art in view of the present disclosure can be used in the invention, such as those described above.

[0387] In some embodiments, one of A₁, A₂, A₃, A₄, and A₅ is nitrogen, one of A₁, A₂, A₃, A₄, and A₅ is carbon substituted with —COOH and the rest are CH, i.e., forming a pyridinyl ring substituted with carboxylic acid.

[0388] In some embodiments, one of A₆, A₇, A₈, A₉, and A₁₀ is nitrogen, one of A₆, A₇, A₈, A₉, and A₁₀ is carbon substituted with —COOH, and the rest are CH, i.e., forming a pyridinyl ring substituted with carboxylic acid.

[0389] In one embodiment, at least one of R₁, R₂, R₃, R₄ and R₅ is —COOH. In one embodiment, at least one of R₆, R₇, R₈, R₉, and R₁₀ is —COOH. In another embodiment, at least one of R₁, R₂, R₃, R₄ and R₅ is —COOH; and at least one of R₆, R₇, R₈, R₉, and R₁₀ is —COOH.

[0390] In some embodiments, each of A₁ and A₁₀ is nitrogen; A₂ is CR₂ and R₂ is —COOH; A₉ is CR₉ and R₉ is —COOH; each of A₃-A₈ is CR₂, CR₃, CR₄, CR₅, CR₆, CR₇, and CR₈, respectively; and each of R₃ to Ra is hydrogen.

[0391] In some embodiments, one of A₁, A₂, A₃, A₄, and A₅ is nitrogen, one of A₁, A₂, A₃, A₄, and A₅ is carbon substituted with tetrazolyl and the rest are CH.

[0392] In some embodiments, one of A₆, A₇, A₈, A₉, and A₁₀ is nitrogen, one of A₆, A₇, A₈, A₉, and A₁₀ is carbon substituted with tetrazolyl, and the rest are CH.

[0393] In one embodiment, at least one of R₁, R₂, R₃, R₄ and R₅ is tetrazolyl. In one embodiment, at least one of R₆, R₇, R₈, R₉, and R₁₀ is tetrazolyl. In another embodiment, at least one of R₁, R₂, R₃, R₄ and R₅ is tetrazolyl; and at least one of R₆, R₇, R₈, R₉, and R₁₀ is tetrazolyl. In some embodiments, each R₁₂ is hydrogen.

[0394] In some embodiments, R₁₁ is an alkynyl group or cycloalkynyl group, preferably cyclooctynyl or a cyclooctynyl derivative, e.g., DBCO.

[0395] In particular embodiments of a chelator of formula (II);
[0396] each of A₁ and A₁₀ is nitrogen;
[0397] A₂ is CR₂ and R₂ is —COOH;
[0398] A₉ is CR₉ and R₁₀ is —COOH;
[0399] each of A₃-A₈ is CR₂, CR₃, CR₄, CR₅, CR₆, CR₇, and CR₈, respectively;
[0400] each of R₃ to Ra is hydrogen;
[0401] one of Z₁ and Z₂ is —(CH₂)ₘ—and the other of Z₁ and Z₂ is —(CH₂)ₙ—C(R₁₂)(X)—(CH₂)ₙ—;
[0402] R₁₂ is hydrogen;
[0403] m is 1;
[0404] each n is 0;
[0405] X is —L₁-R₁₁, wherein L₁ is a linker and —R₁₁ is an electrophilic group, e.g., cyclooctynyl or cyclooctynyl derivative such as DBCO; and each of R₁₄—R₁₇ is hydrogen, or alternatively R₁₆ and R₁₇ are taken together with the carbon atoms to which they are attached to form a 5- or 6-membered cycloalkyl ring.
   In certain embodiments, a chelator has the structure of formula (III):

[chemical structure]

[0406] wherein:
   [0407] each A₁₁ is independently O, S, NMe, or NH;
   [0408] each R₁₈ is independently selected from the group consisting of hydrogen, halo, alkyl, alkenyl, cycloalkyl, cycloalkenyl, aryl, heterocyclyl, heteroaryl, —OR₁₃, —SR₁₃, —COOR₁₃, —OC(O)R₁₃, —N(R₁₃)₂, —CON(R₁₃)₂, —NO₂, —CN—OC(O)N(R₁₃)₂, and —X,
   [0409] and Z₁, Z₂, X, n, m, L₁, R₁₁—R₁₇ are as described above for formula (I),
   [0410] provided that the chelator comprises at least one X, and when R₁₈ is X, then L₁ is a linker or at least one of R₁₂ and R₁₄—R₁₇ is not hydrogen.

[0411] In some embodiments, each A₁₁ is the same, and each An is O, S, NMe, or NH. For example, each A₁₁ can be S. In other embodiments, each An is different and each is independently selected from O, S, NMe, and NH.

[0412] In some embodiments, each R₁₈ is independently —(CH₂)ₚ—COOR₁₃ or tetrazolyl, wherein R₁₃ is hydrogen and each p is independently 0 or 1.

[0413] In some embodiments, each R₁₈ is —COOH.

[0414] In some embodiments, each R₁₈ is —CH₂COOH.

[0415] In some embodiments, each R₁₈ is tetrazolyl.

[0416] In particular embodiments of a chelator of formula (III);
[0417] each R₁₈ is COOH;
[0418] one of Z₁ and Z₂ is —(CH₂)ₘ—and the other of Z₁ and Z₂ is —(CH₂)ₙ—C(R₁₂)(X)—(CH₂)ₙ—;
[0419] R₁₂ is hydrogen;
[0420] m is 1; each n is 0;
[0421] X is —L₁-R₁, wherein L₁ is a linker and —R₁₁ is an electrophilic group, e.g., cyclooctynyl or cyclooctynyl derivative such as DBCO, or BCN; and
[0422] each of R₁₄—R₁₇ is hydrogen, or alternatively R₁₆ and R₁₇ are taken together with the carbon atoms to which they are attached to form a 5- or 6-membered cycloalkyl ring.

[0423] In particular embodiments of the invention, a chelator is selected from the group consisting of:

[chemical structure]

[chemical structure]

[chemical structure]

[0424] wherein:
   [0425] L₁is absent or a linker;
   [0426] R₁₁ is a nucleophilic moiety or an electrophilic moiety, or R₁₁ comprises an antigen binding domain (e.g., the Fab of KL2B30); and each R₁₂ is independently hydrogen, —CH₃, or —CH₂CH₃, provided at least one R₁₂ is —CH₃ or —CH₂CH₃.

[0427] In some embodiments, R₁₁ is —NH₂, —NCS, —NCO, —N₃, alkynyl, cycloalkynyl, —C(O)R₁₃, —COOR₁₃, —CON(R₁₃)₂, maleimido, acyl halide, tetrazine, or trans-cyclooctene.

[0428] In certain embodiments, Ru is cyclooctynyl or a cyclooctynyl derivative selected from the group consisting of bicyclononynyl (BCN), difluorinated cyclooctynyl (DIFO), dibenzocyclooctynyl (DIBO), keto-DIBO, biarylazacyclooctynonyl (BARAC), dibenzoazacyclooctynyl (DIBAC, DBCO, ADIBO), dimethoxyazacyclooctynyl (DIMAC), difluorobenzocyclooctynyl (DIFBO), monobenzocyclooctynyl (MOBO), and tetramethoxy dibenzocyclooctynyl (TMDIBO).

[0429] Preferably, R₁₁ is an alkynyl group or cycloalkynyl group, more preferably a cycloalkynyl group, e.g., DBCO or BCN.

[0430] Exemplary chelators of the invention include, but are not limited to:

[chemical structure]

[chemical structure]

[chemical structure]

[chemical structure]

[0431] Such chelators can be covalently attached to an antigen binding domain to form immunoconjugates or radioimmunoconjugates by reacting the chelator with an azide-labeled antigen binding domain to form a 1,2,3-triazole linker via a click chemistry reaction as described in WO2020/229974.

[0432] Chelators of the invention can be produced by any method known in the art in view of the present disclosure. For example, the pendant aromatic/heteroaromatic groups can be attached to the macrocyclic ring portion by methods known in the art, such as those exemplified and described in WO2020/229974.

### CHELATORS OF FORMULAE (IV), (V) and (VI)

[0433] In an embodiment, the chelator is directed to a compound of formula (IV)

[chemical structure]

[0434] or a pharmaceutically acceptable salt thereof, wherein:
   [0435] R₁ is hydrogen and R₂ is —L₁-R₄;
   [0436] alternatively, R₁ is —L₁-R₄ and R₂ is hydrogen;
   [0437] R₃ is hydrogen;
   [0438] alternatively, R₂ and R₃ are taken together with the carbon atoms to which they are attached to form a 5- or 6-membered cycloalkyl, wherein the 5- or 6-membered cycloalkyl is optionally substituted with-L₁-R₄:
   [0439] L₁ is absent or a linker; and
   [0440] R₄ is a nucleophilic moiety, an electrophilic moiety, or an antigen binding domain (e.g., the Fab of KL2B30).

[0441] In some embodiments, L₁ is absent. When L₁ is absent, R₄ is directly bound (e.g., via covalent linkage) to the compound.

[0442] In some embodiments, L₁ is a linker. As used herein, the term “linker” refers to a chemical moiety that joins a compound of the invention to a nucleophilic moiety, electrophilic moiety, or antigen binding domain. Any suitable linker known to those skilled in the art in view of the present disclosure can be used in the invention. The linkers can have, for example, a substituted or unsubstituted alkyl, a substituted or unsubstituted heteroalkyl moiety, a substituted or unsubstituted aryl or heteroaryl, a polyethylene glycol (PEG) linker, a peptide linker, a sugar-based linker, or a cleavable linker, such as a disulfide linkage or a protease cleavage site such as valine-citrulline-p-aminobenzyl (PAB). Exemplary linker structures suitable for use in the invention include, but are not limited to:

[chemical structure]

wherein m is an integer of 0 to 12.

[0443] In some embodiments, R₄ is a nucleophilic moiety or an electrophilic moiety. A “nucleophilic moiety” or “nucleophilic group” refers to a functional group that donates an electron pair to form a covalent bond in a chemical reaction. An “electrophilic moiety” or “electrophilic group” refers to a functional group that accepts an electron pair to form a covalent bond in a chemical reaction. Nucleophilic groups react with electrophilic groups, and vice versa, in chemical reactions to form new covalent bonds. Reaction of the nucleophilic group or electrophilic group of a compound of the invention with an antigen binding domain or other chemical moiety (e.g., linker) comprising the corresponding reaction partner allows for covalent linkage of the antigen binding domain or chemical moiety to the compound of the invention.

[0444] Exemplary examples of nucleophilic groups include, but are not limited to, azides, amines, and thiols. Exemplary examples of electrophilic groups include, but are not limited to amine-reactive groups, thiol-reactive groups, alkynyls and cycloalkynyls. An amine-reactive group preferably reacts with primary amines, including primary amines that exist at the N-terminus of each polypeptide chain and in the side-chain of lysine residues. Examples of amine-reactive groups suitable for use in the invention include, but are not limited to, N-hydroxy succinimide (NHS), substituted NHS (such as sulfo-NHS), isothiocyanate (—NCS), isocyanate (—NCO), esters, carboxylic acid, acyl halides, amides, alkylamides, and tetra- and per-fluoro phenyl ester. A thiol-reactive group reacts with thiols, or sulfhydryls, preferably thiols present in the side-chain of cysteine residues of polypeptides. Examples of thiol-reactive groups suitable for use in the invention include, but are not limited to, Michael acceptors (e.g., maleimide), haloacetyl, acyl halides, activated disulfides, and phenyloxadiazole sulfone.

[0445] In certain embodiments, R₄ is —NH₂, —NCS (isothiocyanate), —NCO (isocyanate), —N₃ (azido), alkynyl, cycloalkynyl, carboxylic acid, ester, amido, alkylamide, maleimido, acyl halide, tetrazine, or trans-cyclooctene, more particularly-NCS, —NCO, —N₃, alkynyl, cycloalkynyl, —C(O)R₁₃, —COOR₁₃, —CON(R₁₃)₂, maleimido, acyl halide (e.g., —C(O) CI, —C(O)Br), tetrazine, or trans-cyclooctene wherein each R₁₃ is independently hydrogen or alkyl.

[0446] In some embodiments, R₄ is an alkynyl, cycloalkynyl, or azido group thus allowing for attachment of the compound of the invention to an antigen binding domain or other chemical moiety (e.g., linker) using a click chemistry reaction. In such embodiments, the click chemistry reaction that can be performed is a Huisgen cycloaddition or 1,3-dipolar cycloaddition between an azido (—N₃) and an alkynyl or cycloalkynyl group to form a 1,2,4-triazole linker or moiety. In one embodiment, the compound of the invention comprises an alkynyl or cycloalkynyl group and the antigen binding domain or other chemical moiety comprises an azido group. In another embodiment, the compound of the invention comprises an azido group and the antigen binding domain or other chemical moiety comprises an alkynyl or cycloalkynyl group.

[0447] In certain embodiments, R₄ is an alkynyl group, more preferably a terminal alkynyl group or cycloalkynyl group that is reactive with an azide group, particularly via strain-promoted azide-alkyne cycloaddition (SPAAC). Examples of cycloalkynyl groups that can react with azide groups via SPAAC include, but are not limited to cyclooctynyl or a bicyclononynyl (BCN), difluorinated cyclooctynyl (DIFO), dibenzocyclooctynyl (DIBO), keto-DIBO, biarylazacyclooctynonyl (BARAC), dibenzoazacyclooctynyl (DIBAC, DBCO, ADIBO), dimethoxyazacyclooctynyl (DIMAC), difluorobenzocyclooctynyl (DIFBO), monobenzocyclooctynyl (MOBO), and tetramethoxy dibenzocyclooctynyl (TMDIBO).

[0448] In certain embodiments, R₄ is dibenzoazacyclooctynyl (DIBAC, DBCO, ADIBO), which has the following structure:

[chemical structure]

In embodiments in which R₄ is DBCO, the DBCO can be covalently linked to a compound directly or indirectly via a linker, and is preferably attached to the compound indirectly via a linker.

[0449] In certain embodiments, R₄ comprises an antigen binding domain. The antigen binding domain can be linked to the compound directly via a covalent linkage, or indirectly via a linker. In preferred embodiments, the antigen binding domain has binding specificity for hK2, such as the Fab of KL2B30.

[0450] In another embodiment, the chelator is directed to a compound of formula (V):

[chemical structure]

[0451] or a pharmaceutically acceptable salt thereof, wherein:
   [0452] L₁ is absent or a linker; and
   [0453] R₄ is a nucleophilic moiety, an electrophilic moiety, or an antigen binding domain.

[0454] In another embodiment the chelator is a compound of formula (VI):

[chemical structure]

[0455] or a pharmaceutically acceptable salt thereof, wherein:
   [0456] L₁ is absent or a linker; and
   [0457] R₄ is a nucleophilic moiety, an electrophilic moiety, or an antigen binding domain (e.g., the Fab of KL2B30).

[0458] In another embodiment, the invention is directed to a compound, wherein: R₁ is —L₁-R₄; R₂ and R₃ are taken together with the carbon atoms to which they are attached to form a 5- or 6-membered cycloalkyl; L₁ is absent or a linker; and R₄ is a nucleophilic moiety, an electrophilic moiety, or an antigen binding domain; or a pharmaceutically acceptable salt thereof.

[0459] In a further embodiment, the invention is directed to a compound, wherein R₁ is H; R₂ and R₃ are taken together with the carbon atoms to which they are attached to form a 5- or 6-membered cycloalkyl substituted with-L₁-R₄; L₁ is absent or a linker; and R₄ is a nucleophilic moiety, an electrophilic moiety, or an antigen binding domain; or a pharmaceutically acceptable salt thereof;
[0460] Additional embodiments include those wherein R₄ is an antigen binding domain. According to preferred embodiments, R₄ comprises an antigen binding domain with binding specificity for hK2, such as the Fab of KL2B30.

[0461] In an embodiment, the chelators are any one or more independently selected from the group consisting of:

[chemical structure]

[chemical structure]

[chemical structure]

[chemical structure]

[chemical structure]

[chemical structure]

[chemical structure]

wherein n is 1-10.

[0462] Said chelators can be covalently attached to an antigen binding domain (e.g., the Fab of KL2B30) to form immunoconjugates or radioimmunoconjugates by reacting the compound with an azide-labeled antigen binding domain to form a 1,2,3-triazole linker, e.g., via a click chemistry reaction as described in WO2020/229974.

[0463] Chelators, radiometal complexes and radioimmunoconjugates of the present invention can be produced by any method known in the art in view of the present disclosure; for example, the pendant aromatic/heteroaromatic groups can be attached to the macrocyclic ring portion by methods known in the art, such as those exemplified and described in WO2020/229974.

### Radiometal Complexes

[0464] In another general aspect, the invention relates to a radiometal complex comprising a radiometal ion coordinated to a chelator of the invention via coordinate bonding. Any of the chelators of the invention described herein can comprise a radiometal ion. Preferably, the radiometal ion is an alpha-emitting radiometal ion, more preferably ²²⁵Ac. Chelators of the invention can robustly chelate radiometal ions, particularly ²²⁵Ac at any specific activity irrespective of metal impurities, thus forming a radiometal complex having high chelation stability in vivo and in vitro and which is stable to challenge agents, e.g., diethylene triamine pentaacetic acid (DTPA).

[0465] According to embodiments of the invention, a radiometal complex has the structure of formula (I-m):

[chemical structure]

[0466] wherein the variable groups are as defined above in the chelators of the invention, e.g., the chelator of formula (I); and M is a radiometal ion. The radiometal ion M is bound to the chelator via coordinate bonding to form the radiometal complex. Heteroatoms of the macrocyclic ring of the chelator as well as any functional groups of the pendant arms (i.e., —Z₁-ring A and/or-Z₂-ring B) can participate in coordinate bonding of the radiometal ion.

[0467] Any of the chelators of formula (I) described above can be used to form radiometal complexes of formula (I-m).

[0468] In certain embodiments, the radiometal ion M is an alpha-emitting radiometal ion Preferably, the alpha-emitting radiometal ion is ²²⁵Ac.

[0469] According to embodiments of the invention, a radiometal complex comprises at least one X group, wherein X is —L₁-R₁₁, wherein L₁ is absent or a linker, and Ru is an electrophilic moiety or a nucleophilic moiety, or R₁₁ comprises an antigen binding domain (e.g., the Fab of KL2B30). When R₁₁ is a nucleophilic or electrophilic moiety, such moiety can be used for attachment of the radiometal complex to an antigen binding domain, directly or indirectly via a linker.

[0470] In certain embodiments, a radiometal comprises a single X group, and preferably L₁ of the X group is a linker.

[0471] In particular embodiments, Ru is —NH₂, —NCS (isothiocyanate), —NCO (isocyanate), —N₃ (azido), alkynyl, cycloalkynyl, carboxylic acid, ester, amido, alkylamide, maleimido, acyl halide, tetrazine, or trans-cyclooctene, more particularly-NCS, —NCO, —N₃, alkynyl, cycloalkynyl, —C(O)R₁₃, —COOR₁₃, —CON(R₁₃)₂, maleimido, or acyl halide (e.g., —C(O)Cl or —C(O)Br), wherein each R₁₃ is independently hydrogen or alkyl.

[0472] In some embodiments, R₁₁ is an alkynyl, cycloalkynyl, or azido group thus allowing for attachment of the chelator to an antigen binding domain or other chemical moiety (e.g., linker) using a click chemistry reaction.

[0473] In certain embodiments, R₁₁ is an alkynyl group, more preferably a terminal alkynyl group or cycloalkynyl group that is reactive with an azido group, particularly via strain-promoted azide-alkyne cycloaddition (SPAAC). Examples of cycloalkynyl groups that can react with azide groups via SPAAC include, but are not limited to cyclooctynyl or a cyclooctynyl derivative, such as bicyclononynyl (BCN), difluorinated cyclooctynyl (DIFO), dibenzocyclooctynyl (DIBO), keto-DIBO, biarylazacyclooctynonyl (BARAC), dibenzoazacyclooctynyl (DIBAC, DBCO, ADIBO), dimethoxyazacyclooctynyl (DIMAC), difluorobenzocyclooctynyl (DIFBO), monobenzocyclooctynyl (MOBO), and tetramethoxy dibenzocyclooctynyl (TMDIBO).

[0474] In a particular embodiment, R₁₁ is dibenzoazacyclooctynyl (DIBAC, DBCO, ADIBO), which has the following structure:

[chemical structure]

[0475] In such embodiments in which Ru is DBCO, the DBCO can be covalently linked to a radiometal complex directly or indirectly via a linker, and is preferably attached to the radiometal complex indirectly via a linker.

[0476] In another particular embodiment, R₁₁ is bicyclononynyl (BCN).

[0477] According to embodiments of the invention, each of ring A and ring B is independently a 6-10 membered aryl or a 5-10 membered heteroaryl. In alternative embodiments, it is contemplated that each of ring A and ring B is an optionally substituted heterocyclyl ring, such as oxazoline. Each of ring A and ring B can be optionally and independently substituted with one or more substituent groups independently selected from the group consisting of halo, alkyl, alkenyl, cycloalkyl, cycloalkenyl, aryl, heterocyclyl, heteroaryl, —OR₁₃, —SR₁₃, —(CH₂)ₚCOOR₁₃, —OC(O)R₁₃, —N(R₁₃)₂, —CON(R₁₃)₂, —NO₂, —CN—OC(O)N(R₁₃)₂, and X. Examples of 6-10 membered aryl groups suitable for this purpose include, but are not limited to, phenyl and naphthyl. Examples of 5 to 10 membered heteroaryl groups suitable for this purpose include, but are not limited to pyridinyl, isothiazolyl, isoxazolyl, and imidazolyl. Examples of suitable substituents of the 5 to 10 membered heteroaryl and 6 to 10 membered aryl groups include, but are not limited to —COOH, tetrazolyl, and —CH₂COOH.

[0478] In certain embodiments, each of ring A and ring B are independently and optionally substituted with one or more carboxyl groups, including but not limited to, —COOH and —CH₂COOH.

[0479] In one embodiment, ring A and ring B are the same, e.g., both ring A and ring B are pyridinyl. In another embodiment, ring A and ring B are different, e.g., one of ring A and ring is pyridinyl and the other is phenyl.

[0480] In a particular embodiment, both ring A and ring B are pyridinyl substituted with-COOH.

[0481] In a particular embodiment, both ring A and ring B are pyridinyl substituted with tetrazolyl.

[0482] In another particular embodiment, both ring A and ring B are picolinic acid groups having the following structure:

[chemical structure]

[0483] According to embodiments of the invention, each of Z₁ and Z₂ is independently-(C(R₁₂)₂)ₘ—or —(CH₂)ₙ—C(R₁₂)(X)—(CH₂)ₙ—; each X is independently —L₁-R₁₁; each n is independently 0, 1, 2, 3, 4, or 5; and each m is independently 1, 2, 3, 4, or 5.

[0484] In some embodiments, both Z₁ and Z₂ are-(CH₂)ₘ—, wherein each m is preferably 1. In such embodiments, a carbon atom of the macrocyclic ring, ring A, or ring B is substituted with an X group.

[0485] In some embodiments, one of Z₁ and Z₂ is —(CH₂)ₙ—C(R₁₂)(X)—(CH₂)ₙ—and the other is —(CH₂)ₘ—.

[0486] In some embodiments, one of Z₁ and Z₂—(CH₂)ₙ—C(R₁₂)(X)—(CH₂)ₙ—and the other is —(CH₂)ₘ—; each n is 0; m is 1; X is —L₁-R₁₁; and L₁ is a linker.

[0487] In some embodiments, both Z₁ and Z₂ are-(CH₂)ₘ—; each m is independently 0, 1, 2, 3, 4, or 5, preferably each m is 1; and one of R₁₄, R₁₅, R₁₆, and R₁₇ is X, and the rest of R₁₄, R₁₅, R₁₆, and R₁₇ are each hydrogen.

[0488] In some embodiments, R₁₄ and R₁₅ are taken together with the carbon atoms to which they are attached to form a 5- or 6-membered cycloalkyl ring (e.g., cyclopentyl or cyclohexyl). Such 5- or 6-membered cycloalkyl ring can be substituted with an X group.

[0489] In some embodiments R₁₆ and R₁₇ are taken together with the carbon atoms to which they are attached to form a 5- or 6-membered cycloalkyl ring (e.g., cyclopentyl or cyclohexyl). Such 5- or 6-membered cycloalkyl ring can be substituted with an X group.

[0490] In certain embodiments a radiometal complex has the structure of formula (II-m):

[chemical structure]

wherein the variable groups are as defined above in the chelators of the invention, e.g., the chelator of formula (II); and M is a radiometal ion, preferably an alpha-emitting radiometal ion, more preferably ²²⁵Ac.

[0491] Any of the chelators of formula (II) described above can be used to form radiometal complexes of formula (II-m).

[0492] In some embodiments, one of A₁, A₂, A₃, A₄, and A₅ is nitrogen, one of A₁, A₂, A₃, A₄, and A₅ is carbon substituted with —COOH and the rest are CH, i.e., forming a pyridinyl ring substituted with carboxylic acid.

[0493] In some embodiments, one of A₆, A₇, A₈, A₉, and A₁₀ is nitrogen, one of A₆, A₇, A₈, A₉, and A₁₀ is carbon substituted with —COOH, and the rest are CH, i.e., forming a pyridinyl ring substituted with carboxylic acid.

[0494] In one embodiment, at least one of R₁, R₂, R₃, R₄ and R₅ is —COOH. In one embodiment, at least one of R₆, R₇, R₈, R₉, and R₁₀ is —COOH. In another embodiment, at least one of R₁, R₂, R₃, R₄ and R₅ is —COOH; and at least one of R₆, R₇, R₈, R₉, and R₁₀ is —COOH.

[0495] In some embodiments, each of A₁ and A₁₀ is nitrogen; A₂ is CR₂ and R₂ is —COOH; A₉ is CR₉ and R₉ is —COOH; each of A₃-A₅ is CR₂, CR₃, CR₄, CR₅, CR₆, CR₇, and CR₈, respectively; and each of R₃ to R₅ is hydrogen.

[0496] In one embodiment, at least one of R₁, R₂, R₃, R₄ and R₅ is tetrazolyl. In one embodiment, at least one of R₆, R₇, R₈, R₉, and R₁₀ is tetrazolyl. In another embodiment, at least one of R₁, R₂, R₃, R₄ and R₅ is tetrazolyl; and at least one of R₆, R₇, R₈, R₉, and R₁₀ is tetrazolyl.

[0497] In some embodiments, each R₁₂ is hydrogen.

[0498] In some embodiments, R₁₁ is an alkynyl group or cycloalkynyl group, preferably cyclooctynyl or a cyclooctynyl derivative, e.g., DBCO.

[0499] In particular embodiments of a radiometal complex of formula (II-m): M is ²²⁵Ac;
[0500] each of A₁ and A₁₀ is nitrogen;
[0501] A₂ is CR₂ and R₂ is —COOH;
[0502] A₉ is CR₉ and R₉ is —COOH;
[0503] each of A₃-A₅ is CR₂, CR₃, CR₄, CR₅, CR₆, CR₇, and CR₈, respectively;
[0504] each of R₃ to R₅ is hydrogen;
[0505] one of Z₁ and Z₂ is —(CH₂)ₘ—and the other of Z₁ and Z₂ is —(CH₂)ₙ—C(R₁₂)(X)—(CH₂)ₙ—;
[0506] R₁₂ is hydrogen;
[0507] m is 1;
[0508] each n is 0;
[0509] X is —L₁-R₁₁, wherein L₁ is a linker and —R₁₁ is an electrophilic group, e.g., cyclooctynyl or cyclooctynyl derivative such as DBCO; and
[0510] each of R₁₄—R₁₇ is hydrogen, or alternatively R₁₆ and R₁₇ are taken together with the carbon atoms to which they are attached to form a 5- or 6-membered cycloalkyl ring.

[0511] In certain embodiments, a radiometal complex has the structure of formula (III-m):

[chemical structure]

[0512] wherein the variable groups are as defined above in the chelators of the invention, e.g., the chelator of formula (III); and M is a radiometal ion, preferably an alpha-emitting radiometal ion, more preferably ²²⁵Ac.

[0513] Any of the chelators of formula (III) described above can be used to form radiometal complexes of formula (III-m).

[0514] In some embodiments, each A₁₁ is the same, and each An is O, S, NMe, or NH. For example, each A₁₁ can be S. In other embodiments, each An is different and each is independently selected from O, S, NMe, and NH.

[0515] In some embodiments, each R₁₈ is independently —(CH₂)ₚ—COOR₁₃, wherein R₁₃ is hydrogen and each p is independently 0 or 1.

[0516] In some embodiments, each R₁₈ is —COOH.

[0517] In some embodiments, each R₁₈ is —CH₂COOH.

[0518] In some embodiments, each R₁₈ is tetrazolyl.

[0519] In particular embodiments of a radiometal complex of formula (III-m);
[0520] each R₁₈ is COOH;
[0521] one of Z₁ and Z₂ is —(CH₂)ₘ—and the other of Z₁ and Z₂ is —(CH₂)ₙ—C(R₁₂)(X)—(CH₂)ₙ—;
[0522] R₁₂ is hydrogen;
[0523] m is 1; each n is 0;
[0524] X is —L₁-R₁₁, wherein L₁ is a linker and —Ru is an electrophilic group, e.g., cyclooctynyl or cyclooctynyl derivative such as DBCO; and
[0525] each of R₁₄—R₁₇ is hydrogen, or alternatively R₁₆ and R₁₇ are taken together with the carbon atoms to which they are attached to form a 5- or 6-membered cycloalkyl ring.

[0526] In particular embodiments of the invention, a radiometal complex has one of the following structures:

[chemical structure]

[chemical structure]

[chemical structure]

[0527] wherein;
[0528] M is actinium-225 (²²⁵Ac), L₁is absent or a linker;
[0529] R₁₁ is a nucleophilic moiety or an electrophilic moiety, or R₁₁ comprises an antigen binding domain (e.g., the Fab of KL2B30); and
[0530] each R₁₂ is independently hydrogen, —CH₃, or —CH₂CH₃, provided at least one R₁₂ is —CH₃ or —CH₂CH₃.

[0531] In certain embodiments, the invention is directed to a radiometal complex structure of formula (IV-m):

[chemical structure]

or a pharmaceutically acceptable salt thereof, wherein;
[0532] M⁺ is a radiometal ion, wherein M′ is selected from the group consisting of actinium-225 (²²⁵Ac), radium-223 (²³³Ra), bismuth-213 (²¹³Bi), lead-212 (²¹²Pb(II) and/or ²¹²Pb(IV)), terbium-149 (¹⁴⁹Tb), terbium-152 (¹⁵²Tb), terbium-155 (¹⁵⁵Tb),fermium-255 (²⁵⁵Fm), thorium-227 (²²⁷Th), thorium-226 (²²⁶Th⁴⁺), astatine-211 (²¹¹At), cerium-134 (³⁴Ce), neodymium-144 (¹⁴⁴Nd), lanthanum-132 (¹³²La), lanthanum-135 (¹³⁵La) and uranium-230 (²³⁰U);
[0533] R₁ is hydrogen and R₂ is —L₁-R₄;
[0534] alternatively, R₁ is —L₁-R₄ and R₂ is hydrogen; R₃ is hydrogen;
[0535] alternatively, R₂ and R₃ are taken together with the carbon atoms to which they are attached to form a 5- or 6-membered cycloalkyl, wherein the 5- or 6-membered cycloalkyl is optionally substituted with-L₁-R₄;
[0536] L₁ is absent or a linker;
[0537] R₄ is a nucleophilic moiety, an electrophilic moiety, or an antigen binding domain (e.g., the Fab of KL2B30).

[0538] In another embodiment, the invention is directed to a radiometal complex of formula (V-m):

[chemical structure]

or a pharmaceutically acceptable salt thereof, wherein;
[0539] M⁺ is a radiometal ion, wherein M⁺ is selected from the group consisting of actinium-225 (²²⁵Ac), radium-223 (²³³Ra), bismuth-213 (²¹³Bi), lead-212 (²¹²Pb(II) and/or ²¹²Pb(IV)), terbium-149 (¹⁴⁹Tb), terbium-152 (¹⁵²Tb), terbium-155 (¹⁵⁵Tb),fermium-255 (²⁵⁵Fm), thorium-227 (²²⁷Th), thorium-226 (²²⁶Th⁴⁺), astatine-211 (²¹¹At), cerium-134 (³⁴Ce), neodymium-144 (¹⁴⁴Nd), lanthanum-132 (¹³²La), lanthanum-135 (¹³⁵La) and uranium-230 (²³⁰U);
[0540] L₁is absent or a linker;
[0541] R₄ is a nucleophilic moiety, an electrophilic moiety, or an antigen binding domain (e.g., the Fab of KL2B30).

[0542] In another embodiment, the invention is directed to a compounds of formula (VI-m):

[chemical structure]

or a pharmaceutically acceptable salt thereof, wherein;
[0543] M⁺ is a radiometal ion, wherein M⁺ is selected from the group consisting of actinium-225 (²²⁵Ac), radium-223 (²³³Ra), bismuth-213 (²¹³Bi), lead-212 (²¹²Pb(II) and/or ²¹²Pb(IV)), terbium-149 (¹⁴⁹Tb), terbium-152 (¹⁵²Tb), terbium-155 (¹⁵⁵Tb),fermium-255 (²⁵⁵Fm), thorium-227 (²²⁷Th), thorium-226 (²²⁶Th⁴⁺), astatine-211 (²¹¹At), cerium-134 (³⁴Ce), neodymium-144 (¹⁴⁴Nd), lanthanum-132 (¹³²La), lanthanum-135 (¹³⁵La) and uranium-230 (²³⁰U); L₁ is absent or a linker; and
[0544] R₄ is a nucleophilic moiety, an electrophilic moiety, or an antigen binding domain (e.g., the Fab of KL2B30).

[0545] In another embodiment, the invention is directed to a is radiometal complex wherein;
[0546] M⁺ is a radiometal ion, wherein M⁺ is selected from the group consisting of actinium-225 (²²⁵Ac), radium-223 (²³³Ra), bismuth-213 (²¹³Bi), lead-212 (²¹²Pb(II) and/or ²¹²Pb(IV)), terbium-149 (¹⁴⁹Tb), terbium-152 (¹⁵²Tb), terbium-155 (¹⁵⁵Tb),fermium-255 (²⁵⁵Fm), thorium-227 (²²⁷Th), thorium-226 (²²⁶Th⁴⁺), astatine-211 (²¹¹At), cerium-134 (³⁴Ce), neodymium-144 (¹⁴⁴Nd), lanthanum-132 (¹³²La), lanthanum-135 (¹³⁵La) and uranium-230 (²³⁰U); R₁ is —L₁-R₄;
[0547] R₂ and R₃ are taken together with the carbon atoms to which they are attached to form a 5- or 6-membered cycloalkyl;
[0548] L₁ is absent or a linker; and
[0549] R₄ is a nucleophilic moiety, an electrophilic moiety, or an antigen binding domain (e.g., the Fab of KL2B30);
[0550] or a pharmaceutically acceptable salt thereof.

[0551] In a further embodiment, the invention is directed to a radiometal complex wherein
[0552] M⁺ is a radiometal ion, wherein M⁺ is selected from the group consisting of actinium-225 (²²⁵Ac), radium-223 (²³³Ra), bismuth-213 (²¹³Bi), lead-212 (²¹²Pb(II) and/or ²¹²Pb(IV)), terbium-149 (¹⁴⁹Tb), terbium-152 (¹⁵²Tb), terbium-155 (¹⁵⁵Tb),fermium-255 (²⁵⁵Fm), thorium-227 (²²⁷Th), thorium-226 (²²⁶Th⁴⁺), astatine-211 (²¹¹At), cerium-134 (³⁴Ce), neodymium-144 (¹⁴⁴Nd), lanthanum-132 (¹³²La), lanthanum-135 (¹³⁵La) and uranium-230 (²³⁰U); R₁ is H;
[0553] R₂ and R₃ are taken together with the carbon atoms to which they are attached to form a 5- or 6-membered cycloalkyl substituted with-L₁-R₄;
[0554] L₁ is absent or a linker; and
[0555] R₄ is a nucleophilic moiety, an electrophilic moiety, or an antigen binding domain (e.g., the Fab of KL2B30);
   or a pharmaceutically acceptable salt thereof.

[0556] In certain embodiments, the invention is directed to any one or more radiometal complexes selected from the group consisting of:

[chemical structure]

[chemical structure]

[chemical structure]

[chemical structure]

[chemical structure]

[chemical structure]

wherein n is 1-10 and M⁺ is a radiometal ion, wherein M⁺ is selected from the group consisting 5 of actinium-225 (²²⁵Ac), radium-223 (²³³Ra), bismuth-213 (²¹³Bi), lead-212 (²¹²Pb(II) and/or ²¹²Pb(IV)), terbium-149 (¹⁴⁹Tb), terbium-152 (¹⁵²Tb), terbium-155 (¹⁵⁵Tb),fermium-255 (²⁵⁵Fm), thorium-227 (²²⁷Th), thorium-226 (²²⁶Th⁴⁺), astatine-211 (²¹¹At), cerium-134 (³⁴Ce), neodymium-144 (¹⁴⁴Nd), lanthanum-132 (¹³²La), lanthanum-135 (¹³⁵La) and uranium-230 (²³⁰U).

[0557] Radiometal complexes can be produced by any method known in the art in view of the present disclosure. For example, a chelator of the invention can be mixed with a radiometal ion 10 and the mixture incubated to allow for formation of the radiometal complex. In an exemplary embodiment, a chelator is mixed with a solution of ²²⁵Ac(NO₃) 3 to form a radiocomplex comprising ²²⁵Ac bound to the chelator via coordinate bonding. As described above, chelators of in the invention efficiently chelate radiometals, particularly ²²⁵Ac. Thus, in particular embodiments, a chelator of the invention is mixed with a solution of ²²⁵Ac ion at a ratio by concentration of chelator to ²²⁵Ac ion of 1:1000, 1:500, 1:400, 1:300, 1:200, 1:100, 1:50, 1:10, or 1:5, preferably 1:5 to 1:200, more preferably 1:5 to 1:100. Thus, in some embodiments, the ratio of a chelator of the invention to ²²⁵Ac which can be used to form a radiometal complex is much lower than that which can be achieved with other known ²²⁵Ac chelators, e.g., DOTA. The radiocomplex can be characterized by instant thin layer chromatography (e.g., iTLC-SG), HPLC, LC-MS, etc. Exemplary methods are described, for example, in WO2020/229974.

### Additional Embodiments of Immunoconjugates and Radioimmunoconjugates

[0558] As described herein, chelators and radiometal complexes of the invention can be conjugated to (i.e., covalently linked to) antigen binding domains, such as an immune substance to produce immunoconjugates and/or radioimmunoconjugates that are suitable, for example, for medicinal applications in subjects, e.g., humans, such as targeted radiotherapy. Using the chelators and radiometal complexes of the invention, antigen binding domains, particularly antibodies or antigen binding fragments thereof that can bind specifically to targets of interest (such as cancer cells), can be site-specifically labeled with radiometal ions to produce radioimmunoconjugates. In particular, using the chelators and/or radiometal complexes of the invention, radioimmunoconjugates having high yield chelation of radiometal ions, particularly ²²⁵Ac, and desired chelator-antibody ratio (CAR) can be produced. According to particular embodiments, methods of the present invention provide an average CAR of less than 10, less than 8, less than 6, or less than 4; or a CAR of between about 2 to about 8, or about 2 to about 6, or about 2 to about 4, or about 2 to about 3; or a CAR of about 2, or about 3, or about 4, or about 5, or about 6, or about 7, or about 8.

[0559] According to embodiments of the invention, an immunoconjugate comprises a chelator of the invention, e.g., a chelator of formula (I), formula (II), or formula (III) as described herein, covalently linked to an antibody or antigen binding fragment thereof (e.g., the Fab of KL2B30), preferably via a linker. Numerous modes of attachment with different linkages between the chelator and antibody or antigen binding fragment thereof are possible depending on the reactive functional groups (i.e., nucleophiles and electrophiles) on the chelator and antibody or antigen binding fragment thereof.

[0560] According to embodiments of the invention, a radioimmunoconjugate comprises a radiometal complex of the invention, e.g., a radiometal complex of formula (I-m), formula (II-m), or formula (III-m) as described herein, covalently linked to an antibody or antigen binding fragment thereof (e.g., the Fab of KL2B30), preferably via a linker.

[0561] Any of the chelators or radiometal complexes of the invention, such as those described herein, can be used to produce immunoconjugates or radioimmunoconjugates of the invention.

[0562] In some embodiments, a radiometal complex of a radioimmunoconjugate of the invention comprises an alpha-emitting radiometal ion coordinated to the chelator moiety of the radiocomplex. Preferably, the alpha-emitting radiometal ion is ²²⁵Ac.

[0563] In particular embodiments, an antibody or antigen binding fragment thereof is linked to a radiocomplex via a triazole moiety to form a radioimmunoconjugate of the invention.

[0564] In particular embodiments, the antibody or antigen binding fragment in an immunoconjugate or radioimmunoconjugate of the application can bind specifically to a tumor antigen. Preferably, the antibody or antigen binding fragment binds specifically to hK2.

[0565] Immunoconjugates and radioimmunoconjugates of the invention can be prepared by any method known in the art in view of the present disclosure for conjugating ligands, e.g., antibodies, to chelators, including chemical and/or enzymatic methods. For example, immunoconjugates and radioimmunoconjugates can be prepared by a coupling reaction, including by not limited to, formation of esters, thioesters, or amides from activated acids or acyl halides; nucleophilic displacement reactions (e.g., such as nucleophilic displacement of a halide ring or ring opening of a strained ring system); azide-alkyne Huisgen cycloaddition (e.g., 1,3-dipolar cycloaddition between an azide and alkyne to form a 1,2,3-triazole linker); thiolyne addition; imine formation; Diels-Alder reactions between tetrazines and trans-cycloctene (TCO); and Michael additions (e.g., maleimide addition). Numerous other modes of attachment, with different linkages, are possible depending on the reactive functional group used. The attachment of a ligand can be performed on a chelator that is coordinated to a radiometal ion, or on a chelator which is not coordinated to a radiometal ion.

[0566] According to an embodiment, a radioimmunoconjugate can be produced by covalently linking a radiometal complex of the invention to an antibody or antigen binding fragment thereof by, for example, a click chemistry reaction. Alternatively, a radioimmunoconjugate can be produced by first preparing an immunoconjugate of the invention by covalently linking a chelator of the invention to an antibody or antigen-binding fragment thereof by, for example, a click chemistry reaction; the immunoconjugate can subsequently be labeled with a radiometal ion to produce a radioimmunoconjugate (referred to as “one-step direct radiolabeling”). Both residue-specific and site-specific methods of conjugation can be used to produce immunoconjugate and radioimmunoconjugates of the invention. Such methods are described, for example, in WO2020/229974.

[0567] According to embodiments of the invention, a method of producing a radioimmunoconjugate comprises reacting a chelator or radiocomplex of the invention, wherein R₁₁ is a nucleophilic or electrophilic moiety, with an antibody or antigen binding fragment thereof (e.g., the Fab of KL2B30), or a modified antibody or antigen binding fragment thereof comprising a nucleophilic or electrophilic moiety.

[0568] In one embodiment, a method comprises reacting a chelator of the invention with an antibody or antigen binding fragment thereof, or a modified antibody or antigen binding fragment thereof comprising a nucleophilic or electrophilic functional group, to form an immunoconjugate having a covalent linkage between the chelator and antibody or antigen binding fragment thereof, or modified antibody or antigen binding fragment thereof, and reacting the immunoconjugate with a radiometal ion such that the radiometal ion binds the chelator of the immunoconjugate via coordinate binding, thereby forming the radioimmunoconjugate. This embodiment may be referred to as a “one-step direct radiolabeling” method because there is only one chemical reaction step involving the radiometal.

[0569] In another embodiment, a method comprises reacting a radiocomplex of the invention with an antibody or antigen binding fragment thereof, or a modified antibody or antigen binding fragment thereof comprising a nucleophilic or electrophilic functional group, thereby forming the radioimmunoconjugate. This embodiment may be referred to as a “click radiolabeling” method.

[0570] A modified antibody or antigen binding fragment thereof can be produced by any method known in the art in view of the present disclosure, e.g., by labeling an antibody at a particular residue with a biorthogonal reactive functional group using one or more of the above described methods, or by site-specifically incorporating an unnatural amino acid (e.g., azido- or alkynyl-amino acid) into an antibody using one or more of the above described methods. The degree of labeling (DOL), sometimes called degree of substitution (DOS), is a particularly useful parameter for characterizing and optimizing bioconjugates, such as antibody modified by unnatural amino acid. It is expressed as an average number of the unnatural amino acid coupled to a protein molecule (e.g. an antibody), or as a molar ratio in the form of label/protein. The DOL can be determined from the absorption spectrum of the labeled antibody by any known method in the filed.

[0571] In certain embodiments, as described herein, immunoconjugates and radioimmunoconjugates of the invention are prepared using a click chemistry reaction. For example, radioimmunoconjugates of the invention can be prepared using a click chemistry reaction referred to as “click radiolabeling”. Click radiolabeling uses click chemistry reaction partners, preferably an azide and alkyne (e.g., cyclooctyne or cyclooctyne derivative) to form a covalent triazole linkage between the radiocomplex (radiometal ion bound to the chelator) and antibody or antigen binding fragment thereof. Click radiolabeling methods of antibodies are described in, e.g., International Patent Application No. PCT/US18/65913, entitled “Radiolabeling of Polypeptides” of which the relevant description is incorporated herein by reference. In other embodiments referred to as “one-step direct radiolabeling,” an immunoconjugate is prepared using a click chemistry reaction between an antibody or antigen binding fragment thereof and a chelator; the immunoconjugate is then contacted with a radiometal ion to form the radioimmunoconjugate.

[0572] According to an embodiment, a method of preparing a radioimmunoconjugate comprises binding a radiometal ion to a chelator of the invention (e.g., via coordinate bonding).

[0573] An embodiment of the “one-step direct radiolabeling” method may be described as a method of preparing a radioimmunoconjugate comprising: contacting an immunoconjugate (i.e., polypeptide-chelator complex) with a radiometal ion to thereby form the radioimmunoconjugate, wherein the immunoconjugate comprises a chelator of the present invention. According to particular embodiments, the immunoconjugate has been formed via a click chemistry reaction between the chelator of the present invention and the polypeptide. According to particular embodiments, the radioimmunoconjugate has been formed without metal-free conditions (e.g., without any step(s) of removing or actively excluding common metal impurities from the reaction mixture). This is contrary to certain conventional methods in which it is necessary to radiolabel an antibody under strict metal-free conditions to avoid competitive (non-productive) chelation of common metals such as iron, zinc and copper, which introduce significant challenges into the production process.

[0574] In a particular embodiment, a method of preparing a radioimmunoconjugate of the invention comprises a “one-step direct radiolabeling” method comprising;
[0575] (i) providing a modified polypeptide comprising the polypeptide (e.g., antibody or antigen binding fragment thereof) covalently linked to a first click reaction partner (e.g., an azido group);
[0576] (ii) providing a chelator complex comprising a chelator of the present invention covalently linked to a second click reaction partner (e.g., an alkynyl group or cycloalkynyl group);
[0577] (iii) contacting the modified polypeptide with the chelator complex under a condition to allow the first click reaction partner (e.g., azido group) to react with the second click reaction partner (e.g., alkynyl group or cycloalkynyl group) to thereby form a polypeptide-chelator complex (i.e., immunoconjugate); and
[0578] (iv) contacting the polypeptide-chelator complex with a radiometal ion to thereby prepare the radioimmunoconjugate (wherein the radioimmunoconjugate comprises the polypeptide labeled with the radiometal ion, e.g., a modified antibody or antigen binding fragment thereof labeled with an alpha-emitting radiometal ion bound to the chelator via coordinate bonding).

[0579] According to particular embodiments, step (iv) is performed without metal-free conditions.

[0580] In an alternative embodiment, a method of preparing a radioimmunoconjugate comprises a “click radiolabeling” method comprising;
[0581] (i) providing a modified antibody or antigen binding fragment thereof comprising the antibody or antigen binding fragment thereof covalently linked to an azido group;
[0582] (ii) providing a radiocomplex comprising an alpha-emitting radiometal ion bound to a chelator via coordinate bonding, wherein the chelator is covalently linked to an alkynyl group or cycloalkynyl group; and
[0583] (iii) contacting the modified antibody or antigen binding fragment thereof with the radiocomplex under a condition to allow the azido group to react with the alkynyl group or cycloalkynyl group to thereby prepare the radioimmunoconjugate.

[0584] Conditions for carrying out click chemistry reactions are known in the art, and any conditions for carrying out click chemistry reactions known to those skilled in the art in view of the present disclosure can be used in the invention. Examples of conditions include, but are not limited to, incubating the modified polypeptide and the radiocomplex at a ratio of 1:1 to 1000:1 at a pH of 4 to 10 and a temperature of 20° C., to 70° C.

[0585] The click radiolabeling methods described above allow for chelation of the radiometal ion under low or high pH and/or high temperature conditions to maximize efficiency, which can be accomplished without the risk of inactivating the alkyne reaction partner. The efficient chelation and efficient SPAAC reaction between an azide-labeled antibody or antigen binding fragment thereof and the radiocomplex allows radioimmunoconjugates to be produced with high radiochemical yield even with low azide: antibody ratios. The only step in which trace metals must be excluded is the radiometal ion chelation to the chelating moiety; the antibody production, purification, and conjugation steps do not need to be conducted under metal free conditions.

[0586] Chelators and radiometal complexes of the invention can also be used in the production of site-specific radiolabeled polypeptides, e.g., antibodies. The click radiolabeling methods described herein facilitate site-specific production of radioimmunoconjugates by taking advantage of established methods to install azide groups site-specifically on antibodies (Li, X., et al. Preparation of well-defined antibody-drug conjugates through glycan remodeling and strain-promoted azide-alkyne cycloadditions. Angew Chem Int Ed Engl, 2014. 53 (28): p. 7179-82; Xiao, H., et al., Genetic incorporation of multiple unnatural amino acids into proteins in mammalian cells. Angew Chem Int Ed Engl, 2013. 52 (52): p. 14080-3). Methods of attaching molecules to proteins or antibodies in a site-specific manner are known in the art, and any method of site-specifically labeling an antibody known to those skilled in the art can be used in the invention in view of the present disclosure. Examples of methods to site-specifically modify antibodies suitable for use in the invention include, but are not limited to, incorporation of engineered cysteine residues (e.g., THIOMAB™), use of non-natural amino acids or glycans (e.g., seleno cysteine, p-AcPhe, formylglycine generating enzyme (FGE, SMARTag™), etc.), and enzymatic methods (e.g., use of glycotransferase, endoglycosidase, microbial or bacterial transglutaminase (MTG or BTG), sortase A, etc.).

[0587] In some embodiments, a modified antibody or antigen binding fragment thereof for use in producing an immunoconjugate or radioimmunoconjugate of the invention is obtained by trimming the antibody or antigen binding fragment thereof with a bacterial endoglycosidase specific for the β-1,4 linkage between a core GlcNac residue in an Fc-glycosylation site of the antibody, such as GlycINATOR (Genovis), which leaves the inner most GlcNAc intact on the Fc, allowing for the site-specific incorporation of azido sugars at that site. The trimmed antibody or antigen binding fragment thereof can then be reacted with an azide-labeled sugar, such as UDP-N-azidoacetylgalactosamine (UDP-GalNAz) or UDP-6-azido 6-deoxy GalNAc, in the presence of a sugar transferase, such as GalT galactosyltransferase or GalNAc transferase, to thereby obtain the modified antibody or antigen binding fragment thereof.

[0588] In other embodiments, a modified antibody or antigen binding fragment thereof for use in producing an immunoconjugate or radioimmunoconjugate of the invention is obtained by deglycosylating the antibody or antigen binding fragment thereof with an amidase. The resulting deglycosylated antibody or antigen binding fragment thereof can then be reacted with an azido amine, preferably 3-azido propylamine, 6-azido hexylamine, or any azido-linker-amine or any azido-alkyl/heteroalkyl-amine, such as an azido-polyethylene glycol (PEG)-amine, for example, O-(2-aminoethyl)-O′-(2-azidoethyl)tetraethylene glycol, O-(2-aminoethyl)-O′-(2-azidoethyl) pentaethylene glycol, O-(2-aminoethyl)-O′-(2-azidoethyl)triethylene glycol, etc., or in the presence of a microbial transglutaminase to thereby obtain the modified antibody or antigen binding fragment thereof.

[0589] Any radiometal complex described herein can be used to produce a radioimmunoconjugate of the invention. In particular embodiments, the radiometal complex has the structure of formula (I-m), formula (II-m), or formula (III-m). In particular embodiments, the radiometal complex has a structure selected from the group consisting of:

[chemical structure]

[chemical structure]

[chemical structure]

[0590] wherein M is a radiometal ion, preferably an alpha-emitting radiometal ion, more preferably actinium-225 (²²⁵Ac), Ru is cyclooctynyl or a cyclooctynyl derivative, such as bicyclononynyl (BCN), difluorinated cyclooctynyl (DIFO), dibenzocyclooctynyl (DIBO), keto-DIBO, biarylazacyclooctynonyl (BARAC), dibenzoazacyclooctynyl (DIBAC, DBCO, ADIBO), dimethoxyazacyclooctynyl (DIMAC), difluorobenzocyclooctynyl (DIFBO), monobenzocyclooctynyl (MOBO), and tetramethoxy dibenzocyclooctynyl (TMDIBO).

[0591] In some embodiments, an antibody or antigen binding fragment thereof is covalently linked to an azido group using any method for chemical or enzymatic modification of antibodies and polypeptides known to those skilled in the art in view of the present disclosure. The azido-labeled antibody or antigen binding fragment thereof is reacted with a chelator or radiometal complex of the invention comprising an alkynyl or cycloalkynyl group, preferably a cyclooctynyl group and more preferably DBCO under conditions sufficient for the azido and alkynyl or cycloalkynyl group to undergo a click chemistry reaction to form a 1,2,3-triazole moiety.

[0592] In particular embodiments, the radiommunoconjugates of the application include, but are not limited to:

[chemical structure]

[chemical structure]

[chemical structure]

wherein “mAb” is an antibody or antigen binding domain (e.g., the Fab of KL2B30); L₁ is absent or a linker, preferably a linker, each R₁₂ is independently hydrogen, CH₃ or CH₂CH₃, provided at least one R₁₂ is —CH₃ or —CH₂CH₃; and M is an alpha-emitting radionuclide, preferably ²²⁵Ac. 5

[0593] Examples of radiommunoconjugates of the application include, but are not limited to:

[chemical structure]

[chemical structure]

[0594] wherein “mAb” preferably refers to an antibody or antigen binding domain that has binding specificity for hK2, such as the Fab of KL2B30, or otherwise described herein.

[0595] In certain embodiments, the radioimmunoconjugate is any one or more structures independently selected from the group consisting of:

[chemical structure]

wherein;
[0596] M⁺ is a radiometal ion, wherein M⁺ is selected from the group consisting of actinium-225 (²²⁵Ac), radium-223 (²³³Ra), bismuth-213 (²¹³Bi), lead-212 (²¹²Pb(II) and/or ²¹²Pb(IV)), terbium-149 (¹⁴⁹Tb), terbium-152 (¹⁵²Tb), terbium-155 (¹⁵⁵Tb),fermium-255 (²⁵⁵Fm), thorium-227 (²²⁷Th), thorium-226 (²²⁶Th⁴⁺), astatine-211 (²¹¹At), cerium-134 (³⁴Ce), neodymium-144 (¹⁴⁴Nd), lanthanum-132 (¹³²La), lanthanum-135 (¹³⁵La) and uranium-230 (²³⁰U);
[0597] L₁is absent or a linker; and
[0598] wherein “mAb” preferably refers to an antibody or antigen binding domain that has binding specificity for hK2, such as the Fab of KL2B30, or otherwise described herein.

[0599] In another embodiment, the radioimmunoconjugate is any one or more selected from the group consisting of:

[chemical structure]

[chemical structure]

wherein “mAb” preferably refers to an antibody or antigen binding domain that has binding specificity for hK2, such as the Fab of KL2B30, or otherwise described herein.

[0600] Radioimmunoconjugates produced by the methods described herein can be analyzed using methods known to those skilled in the art in view of the present disclosure. For example, LC/MS analysis can be used to determine the ratio of the chelator to the labeled polypeptide, e.g., antibody or antigen binding fragment thereof; analytical size-exclusion chromatography can be used to determine the oligomeric state of the polypeptides and polypeptide conjugates, e.g., antibody and antibody conjugates; radiochemical yield can be determined by instant thin layer chromatography (e.g., iTLC-SG), and radiochemical purity can be determined by size-exclusion HPLC.

### Pharmaceutical Compositions and Methods of Use

[0601] In another general aspect, the invention relates to a pharmaceutical composition comprising a chelator, radiometal complex, an immunoconjugate, or radioimmunoconjugate of the invention, and a pharmaceutically acceptable carrier. The pharmaceutical composition may comprise one or more pharmaceutically acceptable excipients.

[0602] In one embodiment, a pharmaceutical composition comprises a radiometal complex of the invention, and a pharmaceutically acceptable carrier.

[0603] In another embodiment, a pharmaceutical composition comprises a radioimmunoconjugate of the invention, and a pharmaceutically acceptable carrier.

[0604] As used herein, the term “carrier” refers to any excipient, diluent, filler, salt, buffer, stabilizer, solubilizer, oil, lipid, lipid containing vesicle, microsphere, liposomal encapsulation, or other material well known in the art for use in pharmaceutical formulations. It will be understood that the characteristics of the carrier, excipient or diluent will depend on the route of administration for a particular application. As used herein, the term “pharmaceutically acceptable carrier” refers to a non-toxic material that does not interfere with the effectiveness of a composition according to the invention or the biological activity of a composition according to the invention. According to particular embodiments, in view of the present disclosure, any pharmaceutically acceptable carrier suitable for use in an antibody-based, or a radiocomplex-based pharmaceutical composition can be used in the invention.

[0605] According to particular embodiments, the compositions described herein are formulated to be suitable for the intended route of administration to a subject. For example, the compositions described herein can be formulated to be suitable for parenteral administration, e.g., intravenous, subcutaneous, intramuscular or intratumoral administration.

[0606] In other general aspects, the invention relates to methods of selectively targeting neoplastic cells for radiotherapy and treating neoplastic diseases or disorders. Any of the radiocomplexes or radioimmunoconjugates, and pharmaceutical compositions thereof described herein can be used in the methods of the invention.

[0607] A “neoplasm” is an abnormal mass of tissue that results when cells divide more than they should or do not die when they should. Neoplasms can be benign (not cancer) or malignant (cancer). A neoplasm is also referred to as a tumor. A neoplastic disease or disorder is a disease or disorder associated with a neoplasm, such as cancer. Examples of neoplastic disease or disorders include, but are not limited to, disseminated cancers and solid tumor cancers.

[0608] According to an embodiment, a method of treating prostate cancer (e.g., metastatic prostate cancer, or metastatic castration-resistant prostate cancer) in a subject in need thereof comprises administering to the subject a therapeutically effective amount of a radioimmunoconjugate as described herein, wherein the radioimmunoconjugate comprises a radiometal complex as described herein conjugated to an antigen binding domain with binding specificity for hK2, such as the KL2B30 Fab.

[0609] In an embodiment of the invention, a method of selectively targeting neoplastic cells for radiotherapy comprises administering to a subject in need thereof a radioimmunoconjugate or pharmaceutical composition of the invention to the subject.

[0610] In an embodiment of the invention, a method of treating a neoplastic disease or disorder comprises administering to a subject in need thereof a radioimmunoconjugate or pharmaceutical composition of the invention to the subject.

[0611] In an embodiment of the invention, a method of treating cancer in a subject in need thereof comprises administering to the subject in need thereof a radioimmunoconjugate or pharmaceutical composition of the invention to the subject.

[0612] Radioimmunoconjugates carry radiation directly to, for example, cells, etc., targeted by the antigen binding domain. Preferably, the radioimmunoconjugates carry alpha-emitting radiometal ions, such as ²²⁵Ac. Upon targeting, alpha particles from the alpha-emitting radiometal ions, e.g., ²²⁵Ac and daughters thereof, are delivered to the targeted cells and cause a cytotoxic effect thereto, thereby selectively targeting neoplastic cells for radiotherapy and/or treating the neoplastic disease or disorder.

[0613] Pre-targeting approaches for selectively targeting neoplastic cells for radiotherapy and for treating a neoplastic disease or disorder are also contemplated by the invention. According to a pre-targeting approach, an azide-labeled antibody or antigen binding fragment thereof is dosed, binds to cells bearing the target antigen of the antibody, and is allowed to clear from circulation over time or removed with a clearing agent. Subsequently, a radiocomplex of the invention, preferably a radiocomplex comprising a cyclooctyne or cyclooctyne derivative, e.g., DBCO, is administered and undergoes a SPAAC reaction with azide-labeled antibody bound at the target site, while the remaining unbound radiocomplex clears rapidly from circulation. The pre-targeting technique provides a method of enhancing radiometal ion localization at a target site in a subject.

[0614] In other embodiments, a modified polypeptide, e.g., azide-labeled antibody or antigen binding fragment thereof, and a radiocomplex of the invention are administered to a subject in need of targeted radiotherapy or treatment of a neoplastic disease or disorder in the same composition, or in different compositions.

[0615] In some embodiments, a therapeutically effective amount of a radioimmunoconjugate or pharmaceutical composition of the invention is administered to a subject to treat a neoplastic disease or disorder in the subject, such as cancer.

[0616] In other embodiments of the invention, radioimmunoconjugates and pharmaceutical compositions of the invention can be used in combination with other agents that are effective for treatment of neoplastic diseases or disorders.

[0617] Also provided are radioimmunoconjugates and pharmaceutical compositions as described herein for use in selectively targeting neoplastic cells for radiotherapy and/or for treating a neoplastic disease or disorder and/or for diagnosing a neoplastic disease or disorder; and use of a radioimmunoconjugate or pharmaceutical compositions as described herein in the manufacture of a medicament for selectively targeting neoplastic cells for radiotherapy and/or for treating a neoplastic disease or disorder.

### Examples

[0618] The following examples of the invention are to further illustrate the nature of the invention. It should be understood that the following examples do not limit the invention and that the scope of the invention is to be determined by the appended claims.

### Synthesis of Chelators and Immunoconjugates (Examples 1-21)

[0619] Methods of synthesis for embodiments of chelators described herein are provided, for example, in WO2020/229974, which is incorporated by reference herein. Additional synthetic methods are provided in PCT/IB2021/060350, which is incorporated by reference herein, and below in Examples 1-21.

[0620] In Examples 1-21, some synthesis products are listed as having been isolated as a residue. It will be understood by one of ordinary skill in the art that the term “residue” does not limit the physical state in which the product was isolated and may include, for example, a solid, an oil, a foam, a gum, a syrup, and the like.

[0621] Abbreviations used in the specification, particularly the Schemes and Examples, are as listed in the Table A, below:

TABLE A
Abbreviations

| | |
|---|---|
| ADP= | Adenosine Diphosphate |
| Alexa633 tracer= | Alexa Fluor ® 633 Hydrazide Tracer (ThermoFisher) |
| BSA= | Bovine Serum Albumin |
| ACN or MeCN= | Acetonitrile |
| ATP= | Adenosine Triphosphate |
| BINAP= | (2,2′-Bis(diphenylphosphino)-1,1′-binaphthyl) |
| Brij ™-35= | Polyethylene glycol hexadecyl ether |
| DBCO= | Dibenzocyclooctyl |
| DCM= | Dichloromethane |
| DIPEA or DIEA= | Diisopropylethylamine |
| DMF= | N,N-Dimethylformamide |
| DMSO= | Dimethylsulfoxide |
| DPPF or dppf= | 1,1′-Bis(diphenylphosphino)ferrocene |
| DTPA= | Diethylene triamine pentaacetic acid |
| DTT= | Dithiothrietol |
| EDTA= | Ethylenediaminetetracetic acid |
| eGFR= | Estimated Glomular Filtration Rate |
| EtOH= | Ethanol |
| F12 medium= | Gibco ® F12 Nutrient Medium (ThermoFisher) |
| FBS= | Fetal Bovine Serum |
| G418= | Geneticin ® (G418) Sulfate |
| GFR= | Glomular Filtration Rate |
| GLP-1= | Glucagon-like peptide 1 |
| GRK2= | G protein-coupled Receptor Kinase 2 |
| HATU= | (1-[Bis(dimethylamino)methylene-1H-1,2,3- |
| | triazolo[4,5-b]pyridinium 3-oxid hexafluorophosphate |
| HBSS= | GIBCO ® Hank's Balanced Salt Solution |
| HEPES= | 4-(2-Hydroxyethyl)-1-Piperizine Ethane Sulfonic Acid |
| HPLC= | High Pressure Liquid Chromatography |
| HTRF= | Homogeneous Time Resolved Fluorescence |
| IFG= | Impaired fasting glucose |
| IGT= | Impaired glucose tolerance |
| LCMS or LC/MS= | Liquid chromatography-mass spectrometry |
| LDA= | Lithium diisopropylamide |
| LiHMDS= | Lithium bis(trimethylsilyl)amide |
| MeOH= | Methanol |
| mesyl or Ms= | Methylsulfonyl (i.e. —SO₂—CH₃) |
| mesylate or OMs= | Methanesulfonate (i.e. —O—SO₂—CH₃) |
| MOM= | Methoxy methyl |
| Ms or mesyl= | —SO₂—CH₃ |
| MsCl= | Mesyl Chloride (i.e. CH₃—SO₂—Cl) |
| NaBH(OAc)₃= | Sodium triacetoxyborohydride |
| NAFLD= | Non-alcoholic fatty liver disease |
| Na₂SO₄= | Sodium Sulfate |
| NASH= | Non-alcoholic steatohepatitis |
| NBS= | N-Bromosuccinimide |
| NH(PMB)₃= | tris(4-methoxybenzyl)-λ⁴-azane |
| NMO= | 4-Methylmorpholine N-oxide |
| NMP= | N-Methyl-2-pyrrolidone |
| NMR= | Nuclear Magnetic Resonance |
| OMs or mesylate= | Methanesulfonate (i.e. —O—SO₂—CH₃) |
| OTf or triflate= | Trifluoromethanesulfonate |
| OTs or tosylate= | p-Toluenesulfonate |
| Pd/C= | Palladium on carbon |
| Pd(dba)₂= | Bis(dibenzylideneacetone)dipalladium(0) |
| Pd(dppf)Cl₂= | [1,1′-Bis(diphenylphosphino)ferrocene] Palladium (II) |
| | Dichloride |
| Pd(dppf)Cl₂•CHCl₃= | [1,1′-Bis(diphenylphosphino) |
| | ferrocene]chloropalladium complex with chloroform |
| (1-nap)₃P or P(1-nap)₃= | Tri(1-naphthyl)phosphine |
| Pd(OAc)₂= | Palladium (II) acetate |
| Pd(OH)₂= | Palladium hydroxide |
| Pd(OH)₂/C= | Palladium hydroxide on carbon (Pearlman's Catalyst) |
| Pd(PPh₃)₄= | Tetrakis(triphenylphosphine) palladium (0) |
| PEG= | Polyethylene Glycol |
| PMB= | 4-Methoxybenzyl ether |
| PPh₃= | Triphenylphosphine |
| SNS= | Sympathetic Nervous System |
| TBAB= | Tetra-n-butylammonium bromide |
| TBAF= | Tetra-n-butylammonium fluoride |
| TBAI= | Tetra-n-butylammonium iodide |
| TBSOTf= | Tert-butyldimethylsilyl trifluoromethanesulfonate |
| TEA= | Triethylamine |
| Tf or trifyl= | Trifluoromethylsulfonyl (i.e. —SO₂—CF₃) |
| TFA= | Trifluoroacetic Acid |
| THF= | Tetrahydrofuran |
| THP= | 2-Tetrahydropyranyl |
| TLC= | Thin Layer Chromatography |
| TMS= | Trimethylsilyl |
| TMSN₃= | Trimethylsilyl azide |
| Tosylate or OTs= | p-Toluenesulfonate |
| TOPA= | 6,6′-((1,4,10,13-tetraoxa-7,16-diazacyclooctadecane- |
| | 7,16-diyl)bis(methylene))dipicolinic acid = |
| | H2bp18c6 |
| Ts or tosyl= | -p-Toluenesulfonyl chloride |
| p-TsCl= | p-Toluenesulfonyl chloride |
| Tween-20 ®= | Nonionic detergent (Sigma Aldrich) |

[0622] As used herein, unless otherwise noted, the term “isolated form” shall mean that the compound is present in a form which is separate from any solid mixture with another compound(s), solvent system or biological environment. In an embodiment of the present invention, any of the compounds as herein described are present in an isolated form.

[0623] As used herein, unless otherwise noted, the term “substantially pure form” shall mean that the mole percent of impurities in the isolated compound is less than about 5 mole percent, preferably less than about 2 mole percent, more preferably, less than about 0.5 mole percent, most preferably, less than about 0.1 mole percent. In an embodiment of the present invention, the compound of formula (I) is present as a substantially pure form.

[0624] As used herein, unless otherwise noted, the term “substantially free of a corresponding salt form(s)” when used to described the compound of formula (I) shall mean that mole percent of the corresponding salt form(s) in the isolated base of formula (I) is less than about 5 mole percent, preferably less than about 2 mole percent, more preferably, less than about 0.5 mole percent, most preferably less than about 0.1 mole percent. In an embodiment of the present invention, the compound of formula (I) is present in a form which is substantially free of corresponding salt form(s).

### Example 1

### 4-((6-(methoxycarbonyl)pyridin-2-yl)(16-((6-(methoxycarbonyl)pyridin-2-yl)methyl)-1,4,10,13-tetraoxa-7,16-diazacyclooctadecan-7-yl)methyl)benzoic acid (TOPA-[C-7]-Phenyl-carboxylic acid)

[chemical structure]

[chemical structure]

[0625] Step 1: To a mixture of methyl 6-formylpicolinate (4.00 g, 24.2 mmol), (4-(tert-butoxycarbonyl)phenyl) boronic acid (10.7 g, 48.5 mmol), PdCl₂ (0.21 g, 1.2 mmol), tri (naphthalen-1-yl)phosphine (0.50 g, 1.2 mmol) and potassium carbonate (10.0 g, 72.7 mmol) under nitrogen at −78° C. in a 500 mL three neck round bottom flask was added tetrahydrofuran (100 mL) in one portion. The mixture was purged with nitrogen and stirred at room temperature for 30 min, then heated at 65° C. for 24 h. The reaction mixture was cooled room temperature and filtered through a pad of Celite and the filtrate was concentrated to dryness. The crude product was purified by silica gel chromatography (0-50% EtOAc/petroleum ether) to afford methyl 6-((4-(tert-butoxycarbonyl)phenyl)(hydroxy)methyl)picolinate as a yellow oil (2.5 g, 30% yield).

[0626] Step 2: A stir bar, methyl 6-((4-(tert-butoxycarbonyl)phenyl)(hydroxy)methyl)picolinate (2.50 g, 7.30 mmol), PPh₃ (3.43 g, 13.1 mmol), N-bromosuccinimide (2.13 g, 12.0 mmol) and dichloromethane (30 mL) were added to a 250 mL three neck round bottom flask under nitrogen atmosphere at room temperature and stirred for 1 h. The reaction solution was loaded onto a silica gel column and chromatography (0-30% EtOAc/petroleum ether) gave compound methyl 6-(bromo (4-(tert-butoxycarbonyl)phenyl)methyl)picolinate (1.65 g, 56% yield) as a yellow oil. Step 3: A stir bar, methyl 6-(bromo (4-(tert-butoxycarbonyl)phenyl)methyl)picolinate (1.52 g, 3.69 mmol), methyl 6-((1,4,10,13-tetraoxa-7,16-diazacyclooctadecan-7-yl)methyl)picolinate (1.50 g, 3.69 mmol), Na₂CO₃ (1.17 g, 11.1 mmol), and acetonitrile (30 mL) were added to a 250 mL three neck round-bottomed flask, and the resultant heterogeneous mixture was heated at 90° C. for 16 h under nitrogen atmosphere. Subsequently reaction mixture was cooled to room temperature, filtered through a pad of Celite, and concentrated to dryness in vacuo to give the crude product. The crude product was purified by silica gel chromatography (0-10% MeOH/dichloromethane) to afford methyl 6-((4-(tert-butoxycarbonyl)phenyl)(16-((6-(methoxycarbonyl)pyridin-2-yl)methyl)-1,4,10,13-tetraoxa-7,16-diazacyclooctadecan-7-yl)methyl)picolinate as a brown oil (1.2 g, 44%).

[0627] Step 4: A stir bar, methyl 6-((4-(tert-butoxycarbonyl)phenyl)(16-((6-(methoxycarbonyl)pyridin-2-yl)methyl)-1,4,10,13-tetraoxa-7,16-diazacyclooctadecan-7-yl)methyl)picolinate (1.2 g, 1.6 mmol), TFA (0.62 mL, 8.1 mmol) and DCM (20 mL) were added to a 100 mL three neck round bottom flask at r.t. and stirred for 1 h. Reaction mixture was concentrated to dryness and the resultant crude product was subjected to preparative HPLC (Column: XBRIDGE C18 (19×150 mm) 5.0 um; Mobile phase: 0.1% TFA in water/ACN; Flow Rate: 15.0 mL/min) to give TOPA-[C-7]-Phenyl-carboxylic acid (0.8 g, 72%) as brown oil. LC-MS APCI: Calculated for C35H₄₄N₄O₁₀ 680.31; Observed m/z [M+H]⁺681.5. Purity by LC-MS: 99.87%. Purity by HPLC: 97.14% (97.01% at 210 nm, 97.20% at 254 nm and 97.21% at 280 nm; Column: Atlantis dC18 (250×4.6 mm), 5 um; Mobile phase A: 0.1% TFA in water, Mobile phase B: acetonitrile; Flow rate: 1.0 mL/min. %. ¹H NMR (400 MHZ, DMSO-d6): δ 8.12-8.07 (m, 4H), 8.00-7.98 (m, 2H), 7.75-7.73 (m, 4H), 6.10 (s, 1H), 4.67 (s, 2H), 3.96 (s, 3H), 3.91 (s, 3H), 3.82 (s, 8H), 3.56 (s, 8H), 3.52 (s, 8H).

### Example 2

### 6-((16-((6-Carboxypyridin-2-yl)(4-((2-(2-(2-isothiocyanatoethoxy)ethoxy)ethyl)carbamoyl)phenyl)methyl)-1,4,10,13-tetraoxa-7,16-diazacyclooctadecan-7-yl)methyl)picolinic acid

[chemical structure]

[chemical structure]

[chemical structure]

[0628] Step 1: A stir bar, 4-((6-(methoxycarbonyl)pyridin-2-yl)(16-((6-(methoxycarbonyl)pyridin-2-yl)methyl)-1,4,10,13-tetraoxa-7,16-diazacyclooctadecan-7-yl)methyl)benzoic acid (0.40 g, 0.60 mmol), tert-butyl (2-(2-(2-aminoethoxy)ethoxy)ethyl)carbamate (0.15 g, 0.60 mmol), triethylamine (0.18 g, 0.76 mmol), HATU (0.33 g, 0.90 mmol), and DCM (4.0 mL) were added to a 25 mL three neck round-bottomed flask at 0° C. under nitrogen atmosphere. The mixture was stirred overnight at room temperature. The reaction was treated with water (10 mL) and extracted with dichloromethane (10 mL×3). The combined extracts were washed with 10% aqueous NaHCO₃ (10 mL), brine (10 mL), dried over anhydrous Na₂SO₄, filtered, and concentrated to dryness to yield an oil, which was purified by silica gel chromatography (0-10% MeOH/DCM) to yield methyl 6-((4-((2,2-dimethyl-4-oxo-3,8,11-trioxa-5-azatridecan-13-yl)carbamoyl)phenyl)(16-((6-(methoxycarbonyl)pyridin-2-yl)methyl)-1,4,10,13-tetraoxa-7,16-diazacyclooctadecan-7-yl)methyl)picolinate (0.18 g).

[0629] Step 2: A stir bar, methyl 6-((4-((2,2-dimethyl-4-oxo-3,8,11-trioxa-5-azatridecan-13-yl)carbamoyl)phenyl)(16-((6-(methoxycarbonyl)pyridin-2-yl)methyl)-1,4,10,13-tetraoxa-7,16-diazacyclooctadecan-7-yl)methyl)picolinate (0.18 g, 0.20 mmol), MeOH (1.8 mL), and HCl in methanol (4 M, 1.0 mL, 4.0 mmol) were added to a 10 mL single-neck round-bottomed flask at 0° C., then warmed to room temperature and stirred for 2 h. The volatiles were removed in vacuo to yield methyl 6-((4-((2-(2-(2-aminoethoxy)ethoxy)ethyl)carbamoyl)phenyl)(16-((6-(methoxycarbonyl)pyridin-2-yl)methyl)-1,4,10,13-tetraoxa-7,16-diazacyclooctadecan-7-yl)methyl)picolinate (0.15 g), which was used without purification.

[0630] Step 3: A stir bar, methyl 6-((4-((2-(2-(2-aminoethoxy)ethoxy)ethyl)carbamoyl)phenyl)(16-((6-(methoxycarbonyl)pyridin-2-yl)methyl)-1,4,10,13-tetraoxa-7,16-diazacyclooctadecan-7-yl)methyl)picolinate (0.10 g, 0.12 mmol), triethylamine (37 mg, 0.37 mmol), dry DCM (2 mL), and carbon disulfide (14 mg, 0.18 mmol) were added to a pressure vial at room temperature under a nitrogen atmosphere. The vial was subjected to microwave-irradiation (150 W power) at 90° C. for 30 min. The vial was then cooled to room temperature, the reaction mixture diluted with dichloromethane (10 mL), and then washed successively with water (5 mL), 1 M HCl (5 mL), and water (5 mL), dried over anhydrous Na₂SO₄, filtered, and concentrated to dryness to yield methyl 6-((4-((2-(2-(2-isothiocyanatoethoxy)ethoxy)ethyl)carbamoyl)phenyl)(16-((6-(methoxycarbonyl)pyridin-2-yl)methyl)-1,4,10,13-tetraoxa-7,16-diazacyclooctadecan-7-yl)methyl)picolinate (100 mg), which was used without purification.

[0631] Step 4: A stir bar, methyl 6-((4-((2-(2-(2-isothiocyanatoethoxy)ethoxy)ethyl)carbamoyl)phenyl)(16-((6-(methoxycarbonyl)pyridin-2-yl)methyl)-1,4,10,13-tetraoxa-7,16-diazacyclooctadecan-7-yl)methyl)picolinate (0.10 g, 0.12 mmol), and aqueous HCl (6 N, 0.4 mL, 2.34 mmol) were added to a 10 mL single-neck round-bottomed flask, and stirred at 50° C. for 3 h. The reaction mixture was cooled to room temperature, concentrated to dryness in vacuo to yield an oil, which was purified by preparative HPLC (Column: XBRIDGE C18 19×150 mm, 5.0 um; Mobile phase: 0.1% TFA in water/acetonitrile; Flow Rate: 15.0 mL/min) to yield 6-((16-((6-carboxypyridin-2-yl)(4-((2-(2-(2-isothiocyanatoethoxy)ethoxy)ethyl)carbamoyl)phenyl)methyl)-1,4,10,13-tetraoxa-7,16-diazacyclooctadecan-7-yl)methyl)picolinic acid (5.0 mg). LC-MS APCI: Calculated for C₄₀H₅₂N₆O₁₁S: 824.34; Observed m/z [M+H]⁺824.8. ¹H NMR (400 MHZ, CD₃OD): δ8.22-8.20 (m, 2H), 8.14-8.05 (m, 2H), 7.94 (d, J=8.00 Hz, 2H), 7.79 (d, J=8.00 Hz, 2H), 7.73-7.67 (m, 2H), 6.16 (s, 1H), 4.77 (s, 2H), 3.93-4.00 (m, 8H), 3.59-3.70 (m, 27H), 3.47-3.44 (m, 2H).

### Example 3

### 6-((4-((6-Aminohexyl)carbamoyl)phenyl)(16-((6-carboxypyridin-2-yl)methyl)-1,4,10,13-tetraoxa-7,16-diazacyclooctadecan-7-yl)methyl)picolinic acid and

### Example 4

### 6-((16-((6-Carboxypyridin-2-yl)(4-((6-isothiocyanatohexyl)carbamoyl)phenyl)methyl)-1,4,10,13-tetraoxa-7,16-diazacyclooctadecan-7-yl)methyl)picolinic acid

[chemical structure]

[chemical structure]

[0632] Step 1: A stir bar, 4-((6-(methoxycarbonyl)pyridin-2-yl)(16-((6-(methoxycarbonyl)pyridin-2-yl)methyl)-1,4,10,13-tetraoxa-7,16-diazacyclooctadecan-7-yl)methyl)benzoic acid (0.12 g, 0.18 mmol), tert-butyl (6-aminohexyl)carbamate (38 mg, 0.18 mmol), triethylamine (54 mg, 0.54 mmol), HATU (0.10 g, 0.27 mmol), and DCM (4.0 mL) were added to a 25 mL three-neck round-bottomed flask at 0° C. under a nitrogen atmosphere. The reaction mixture was then brought to room temperature and stirred overnight. The reaction mixture was then treated with water (10 mL) and extracted with dichloromethane (10 mL×3). The combined extracts were washed with 10% aqueous NaHCO₃ (10 mL) and brine (10 mL), dried over anhydrous Na₂SO₄, filtered, and concentrated to dryness to yield an oil. The oil was purified via silica gel chromatography (0-10% MeOH/DCM) to yield methyl 6-((4-((6-((tert-butoxycarbonyl)amino) hexyl)carbamoyl)phenyl)(16-((6-(methoxycarbonyl)pyridin-2-yl)methyl)-1,4,10,13-tetraoxa-7,16-diazacyclooctadecan-7-yl)methyl)picolinate (70 mg) as a gummy oil.

[0633] Step 2: A stir bar, methyl 6-((4-((6-((tert-butoxycarbonyl)amino) hexyl)carbamoyl)phenyl)(16-((6-(methoxycarbonyl)pyridin-2-yl)methyl)-1,4,10,13-tetraoxa-7,16-diazacyclooctadecan-7-yl)methyl)picolinate (70 mg, 0.080 mmol), MeOH (1.5 mL), and HCl in methanol (4 M, 0.4 mL, 1.6 mmol) were added to a 25 mL round-bottomed flask at 0° C., which was subsequently brought to room temperature and stirred for 2 h. The volatiles were removed in vacuo to yield methyl 6-((4-((6-aminohexyl)carbamoyl)phenyl)(16-((6-(methoxycarbonyl)pyridin-2-yl)methyl)-1,4,10,13-tetraoxa-7,16-diazacyclooctadecan-7-yl)methyl)picolinate (30 mg), which was used without purification.

[0634] Step 3: A stir bar, methyl 6-((4-((6-aminohexyl)carbamoyl)phenyl)(16-((6-(methoxycarbonyl)pyridin-2-yl)methyl)-1,4,10,13-tetraoxa-7,16-diazacyclooctadecan-7-yl)methyl)picolinate (30 mg, 0.038 mmol), aqueous LiOH (1.1 mL, 0.1 N, 0.11 mmol), and MeOH (1.0 mL) were added to an 8 mL reaction vial and stirred overnight at room temperature. The reaction mixture was then treated with acetic acid until pH˜6.5, and subsequently concentrated to dryness in vacuo at room temperature. The resultant product was subjected to preparative HPLC (Column: XBRIDGE C18 19×150 mm, 5.0 um; Mobile phase: 10 mM ammonium acetate in water/ACN; Flow Rate: 15.0 mL/min) to yield Example 3:6-((4-((6-aminohexyl)carbamoyl)phenyl)(16-((6-carboxypyridin-2-yl)methyl)-1,4,10,13-tetraoxa-7,16-diazacyclooctadecan-7-yl)methyl)picolinic acid (10 mg). LC-MS APCI: Calculated for C₃₉H₅₄N₆O₉; 750.40; Observed m/z [M+H]⁺751.3. ¹H NMR (400 MHZ, CD₃OD): δ8.22 (d, J=1.60 Hz, 2H), 8.21-8.06 (m, 2H), 7.92 (d, J=8.40 Hz, 2H), 7.80 (d, J=8.40 Hz, 2H), 7.75-7.69 (m, 2H), 6.20 (s, 1H), 4.70 (s, 2H), 4.02-3.92 (m, 8H), 3.76-3.62 (m, 14H), 3.51-3.32 (m, 4H), 2.93 (t, J=8.00 Hz, 2H), 1.67-1.64 (m, 4H), 1.46-1.45 (m, 4H).

[0635] Step 4: A stir bar, methyl 6-((4-((6-aminohexyl)carbamoyl)phenyl)(16-((6-(methoxycarbonyl)pyridin-2-yl)methyl)-1,4,10,13-tetraoxa-7,16-diazacyclooctadecan-7-yl)methyl)picolinate (0.10 g, 0.13 mmol), triethylamine (39 mg, 0.38 mmol), dry DCM (2 mL), and carbon disulfide (15 mg, 0.19 mmol) were added to a pressure vial at room temperature under a nitrogen atmosphere. The vial was subjected to microwave irradiation (150 W power) at 90° C. for 30 min. The vial was then cooled to room temperature and the reaction mixture diluted with dichloromethane (10 mL), washed with water (5 mL), 1 M HCl (5 mL), and water (5 mL), dried over anhydrous Na₂SO₄, filtered, and concentrated to dryness to yield methyl 6-((4-((6-isothiocyanatohexyl)carbamoyl)phenyl)(16-((6-(methoxycarbonyl)pyridin-2-yl)methyl)-1,4,10,13-tetraoxa-7,16-diazacyclooctadecan-7-yl)methyl)picolinate (0.1 g), which was used without purification.

[0636] Step 5: A stir bar, methyl 6-((4-((6-isothiocyanatohexyl)carbamoyl)phenyl)(16-((6-(methoxycarbonyl)pyridin-2-yl)methyl)-1,4,10,13-tetraoxa-7,16-diazacyclooctadecan-7-yl)methyl)picolinate (0.10 g, 0.12 mmol), and aqueous HCl (6 N, 0.4 mL, 2.4 mmol) were added to a 10 mL round-bottomed flask, and then stirred at 50° C. for 3 h. The reaction mixture was then cooled to room temperature and concentrated to dryness in vacuo to yield a residue, which was purified by preparative HPLC (Column: XBRIDGE C18 19×150 mm, 3.5 um; Mobile phase: 0.1% TFA in water/acetonitrile: Flow Rate: 2.0 mL/min) to yield Example 4:6-((16-((6-carboxypyridin-2-yl)(4-((6-isothiocyanatohexyl)carbamoyl)phenyl)methyl)-1,4,10,13-tetraoxa-7,16-diazacyclooctadecan-7-yl)methyl)picolinic acid (15 mg). LC-MS APCI: Calculated for C₄₀H₅₂N₆₀₉S: 792.35: Observed m/z [M+H]⁺792.8. ¹H NMR (400 MHZ, CD₃OD): δ8.23-8.20 (m, 2H), 8.15-8.06 (m, 2H), 7.92 (d, J=8.40 Hz, 2H), 7.79 (d, J=8.40 Hz, 2H), 7.74-7.68 (m, 2H), 6.17 (s, 1H), 4.77 (s, 2H), 4.01-3.93 (m, 8H), 3.75-3.56 (m, 16H), 3.42-3.33 (m, 5H), 1.74-1.64 (m, 4H), 1.50-1.44 (m, 4H).

### Example 5

### 6-((16-((6-Carboxypyridin-2-yl)(4-((4-isothiocyanatophenethyl)carbamoyl)phenyl)methyl)-1,4,10,13-tetraoxa-7,16-diazacyclooctadecan-7-yl)methyl)picolinic acid

[chemical structure]

[chemical structure]

[0637] Step 1: A stir bar, 4-((6-(methoxycarbonyl)pyridin-2-yl)(16-((6-(methoxycarbonyl)pyridin-2-yl)methyl)-1,4,10,13-tetraoxa-7,16-diazacyclooctadecan-7-yl)methyl)benzoic acid (0.25 g, 0.37 mmol), 4-(2-aminoethyl) aniline (60 mg, 0.37 mmol), TEA (0.11 g, 0.15 mL, 1.1 mmol), HATU (0.21 g, 0.55 mmol), and DCM (5 mL) were added to a 25 mL three neck round-bottomed flask at 0° C. under a nitrogen atmosphere. The reaction mixture was stirred overnight at room temperature, and then treated with water (10 mL), and extracted with dichloromethane (10 mL×3). The combined extracts were washed with 10% aqueous NaHCO₃ (10 mL) and brine (10 mL), dried over anhydrous Na₂SO₄, filtered, and concentrated to dryness to yield a product which was purified by silica gel chromatography (0-10% MeOH/DCM) to yield methyl 6-((4-((4-aminophenethyl)carbamoyl)phenyl)(16-((6-(methoxycarbonyl)pyridin-2-yl)methyl)-1,4,10,13-tetraoxa-7,16-diazacyclooctadecan-7-yl)methyl)picolinate (0.12 g).

[0638] Step 2: A stir bar, methyl 6-((4-((4-aminophenethyl)carbamoyl)phenyl)(16-((6-(methoxycarbonyl)pyridin-2-yl)methyl)-1,4,10,13-tetraoxa-7,16-diazacyclooctadecan-7-yl)methyl)picolinate (0.12 g, 0.15 mmol), TEA (45 mg, 65 μL, 0.45 mmol), DCM (3 mL), and CS₂ (17 mg, 0.23 mmol) were added to a 10 mL microwave pressure vial at room temperature under a nitrogen atmosphere. The reaction mixture was subjected to microwave-irradiation (150 W power) at 90° C. for 30 min. The reaction mixture was then cooled to room temperature, diluted with dichloromethane (10 mL), washed successively with water (5 mL), 1 M HCl (5 mL), and water (5 mL), dried over anhydrous Na₂SO₄, and concentrated to dryness to yield methyl 6-((4-((4-isothiocyanatophenethyl)carbamoyl)phenyl)(16-((6-(methoxycarbonyl)pyridin-2-yl)methyl)-1,4,10,13-tetraoxa-7,16-diazacyclooctadecan-7-yl)methyl)picolinate (0.12 g), which was used without purification.

[0639] Step 3: A stir bar, methyl 6-((4-((4-isothiocyanatophenethyl)carbamoyl)phenyl)(16-((6-(methoxycarbonyl)pyridin-2-yl)methyl)-1,4,10,13-tetraoxa-7,16-diazacyclooctadecan-7-yl)methyl)picolinate (0.12 g, 0.14 mmol), and aqueous HCl (0.50 mL, 6 N, 2.8 mmol) were added to a 10 mL single-neck round-bottomed flask and stirred at 50° C. for 3 h. The reaction mixture was cooled to room temperature, concentrated to dryness in vacuo, and the crude product was subjected to preparative HPLC (Column: XBRIDGE C18 19×150 mm, 5.0 um; Mobile phase: 0.1% TFA in water/acetonitrile; Flow Rate: 15.0 mL/min) to yield 6-((16-((6-carboxypyridin-2-yl)(4-((4-isothiocyanatophenethyl)carbamoyl)phenyl)methyl)-1,4,10,13-tetraoxa-7,16-diazacyclooctadecan-7-yl)methyl)picolinic acid (30 mg). LC-MS APCI: Calculated for C₄₂H₄₈N₅O₁₀S; 812.32; Observed m/z [M+H]⁺812.9. ¹H NMR (400 MHZ, CD₃OD): δ8.22 (d, J=0.80 Hz, 2H), 8.06-8.21 (m, 2H), 7.85 (d, J=8.40 Hz, 2H), 7.68-7.78 (m, 4H), 7.31 (d, J=8.40 Hz, 2H), 7.21 (d, J=2.00 Hz, 2H), 6.18 (s, 1H), 4.77 (s, 2H), 3.70-4.00 (m, 7H), 3.60-3.67 (m, 16H), 3.44-3.49 (m, 2H), 2.90-3.10 (m, 3H).

### Example 6

### (S)-6,6′-((2-(((2-Isothiocyanatoethyl)thio)methyl)-1,4,10,13-tetraoxa-7,16-diazacyclooctadecane-7,16-diyl)bis(methylene))dipicolinic acid

[chemical structure]

[chemical structure]

[chemical structure]

[0640] Step 1: A stir bar, 1 (methyl 6-((4-((tert-butoxycarbonyl)amino)phenyl)(16-((6-(methoxycarbonyl)pyridin-2-yl)methyl)-1,4,10,13-tetraoxa-7,16-diazacyclooctadecan-7-yl)methyl)picolinate) (0.10 g, 0.15 mmol), MeOH (0.5 mL) and HCl in methanol (4 M, 0.6 mL, 4.0 mmol) were added to a 25 mL single-neck round-bottomed flask at 0° C. and then brought to room temperature and stirred for 2 h. The volatiles were removed in vacuo to yield dimethyl 6,6′-((2-(((2-aminoethyl)thio)methyl)-1,4,10,13-tetraoxa-7,16-diazacyclooctadecane-7,16-diyl)bis(methylene))(S)-dipicolinate (55 mg), which was used in the next step without purification.

[0641] Step 2: A stir bar, dimethyl 6,6′-((2-(((2-aminoethyl)thio)methyl)-1,4,10,13-tetraoxa-7,16-diazacyclooctadecane-7,16-diyl)bis(methylene))(S)-dipicolinate (50 mg, 0.10 mmol), triethylamine (24 mg, 0.24 mmol), DCM (2 mL) and carbon disulfide (12 mg, 0.16 mmol) were added to a microwave vial at room temperature under a nitrogen atmosphere. The vial was subjected to microwave-irradiation (150 W power) at 90° C. for 30 min. The vial was then cooled to room temperature and the reaction mixture diluted with dichloromethane (10 mL), washed successively with water (5 mL), 1M HCl (5 mL), water (5 mL), dried over anhydrous Na₂SO₄, concentrated to dryness and was subjected to silica gel chromatography (0-10% MeOH/DCM) to yield dimethyl 6,6′-((2-(((2-isothiocyanatoethyl)thio)methyl)-1,4,10,13-tetraoxa-7,16-diazacyclooctadecane-7,16-diyl)bis(methylene))(S)-dipicolinate as a yellow solid (20 mg).

[0642] Step 3: A stir bar, dimethyl 6,6′-((2-(((2-isothiocyanatoethyl)thio)methyl)-1,4,10,13-tetraoxa-7,16-diazacyclooctadecane-7,16-diyl)bis(methylene))(S)-dipicolinate (20 mg, 0.030 mmol) and aqueous HCl (6 N, 0.1 mL, 0.6 mmol) were added to a 10 mL single-neck round-bottomed flask and stirred at room temperature overnight. The reaction mixture was concentrated to dryness in vacuo, and the resultant residue was subjected to preparative HPLC (Column: XBRIDGE C18 (19×150 mm) 5.0 um; Mobile phase: 0.1% TFA in water/acetonitrile; Flow Rate: 15.0 mL/min) to yield(S)-6,6′-((2-(((2-isothiocyanatoethyl)thio)methyl)-1,4,10,13-tetraoxa-7,16-diazacyclooctadecane-7,16-diyl)bis(methylene))dipicolinic acid (6 mg). LC-MS APCI: Calculated for C₃₀H₄₁N₅O₈S₂: 663.24; Observed m/z [M+H]⁺664.2. ¹H NMR (400 MHZ, DMSO-d6): δ 9.78 (s, 1H), 8.10 (s, 4H), 7.78 (d, J=6.00 Hz, 2H), 4.69 (s, 4H), 3.96-3.52 (m, 23H), 2.85 (t, J=6.40 Hz, 2H), 2.70 (t, J=8.00 Hz, 2H).

### Example 7

### (S)-6,6′-((2-(((5-Isothiocyanatopentyl)thio)methyl)-1,4,10,13-tetraoxa-7,16-diazacyclooctadecane-7,16-diyl)bis(methylene))dipicolinic acid

[chemical structure]

[chemical structure]

[chemical structure]

[0643] Step 1: A stir bar, dimethyl 6,6′-((2-(((5-((tert-butoxycarbonyl)amino) pentyl)thio)methyl)-1,4,10,13-tetraoxa-7,16-diazacyclooctadecane-7,16-diyl)bis(methylene))(S)-dipicolinate (0.12 g, 0.15 mmol), MeOH (0.5 mL), and HCl in methanol (4 M, 0.6 mL, 4.0 mmol) were added to a 25 mL single-neck round-bottomed flask at 0° C. and brought to room temperature and stirred for 2 h. The volatiles were then removed in vacuo to yield dimethyl 6,6′-((2-(((5-aminopentyl)thio)methyl)-1,4,10,13-tetraoxa-7,16-diazacyclooctadecane-7,16-diyl)bis(methylene))(S)-dipicolinate (70 mg), which was used without purification.

[0644] Step 2: A stir bar, dimethyl 6,6′-((2-(((5-aminopentyl)thio)methyl)-1,4,10,13-tetraoxa-7,16-diazacyclooctadecane-7,16-diyl)bis(methylene))(S)-dipicolinate (70 mg, 0.10 mmol), triethylamine (20 mg, 0.20 mmol) dry DCM (2 mL) and carbon disulfide (15 mg, 0.20 mmol) were added to a microwave vial at room temperature under a nitrogen atmosphere. The reaction mixture was subjected to microwave-irradiation (150 W power) at 90° C. for 30 min. The vial was brought to room temperature and the reaction mixture was diluted with dichloromethane (10 mL), washed successively with water (5 mL), 1M HCl (5 mL), and water (5 mL), dried over anhydrous sodium sulphate (Na₂SO₄), filtered and concentrated to dryness to yield a residue. The residue was subjected to silica gel chromatography (0-10% MeOH/DCM) to yield dimethyl 6,6′-((2-(((5-isothiocyanatopentyl)thio)methyl)-1,4,10,13-tetraoxa-7,16-diazacyclooctadecane-7,16-diyl)bis(methylene))(S)-dipicolinate as a yellow solid (30 mg).

[0645] Step 3: A stir bar, dimethyl 6,6′-((2-(((5-isothiocyanatopentyl)thio)methyl)-1,4,10,13-tetraoxa-7,16-diazacyclooctadecane-7,16-diyl)bis(methylene))(S)-dipicolinate (30 mg, 0.040 mmol), and aqueous HCl (6 N, 0.2 mL, 0.8 mmol) were added to a 10 mL single-neck round-bottomed flask and stirred overnight at room temperature. The reaction mixture was concentrated to dryness in vacuo, and the concentrate was purified by HPLC (Column: XBRIDGE C18 19×150 mm, 5.0 um; Mobile phase: 0.1% TFA in water/acetonitrile; Flow Rate: 15.0 mL/min) to yield(S)-6,6′-((2-(((5-isothiocyanatopentyl)thio)methyl)-1,4,10,13-tetraoxa-7,16-diazacyclooctadecane-7,16-diyl)bis(methylene))dipicolinic acid (12 mg). LC-MS APCI: Calculated for C₃₃H₄₇N₅O₈S₂; 705.29; Observed m/z [M+H]⁺706.2. ¹H NMR (400 MHZ, DMSO-d6): δ 13.40 (s, 1H), 9.90 (s, 1H), 8.17-8.09 (m, 4H), 7.78 (d, J=6.80 Hz, 2H), 4.70 (s, 4H), 3.93-3.17 (m, 27H), 2.68-2.67 (m, 2H), 1.64-1.60 (m, 2H), 1.53-1.49 (m, 2H), 1.40-1.38 (m, 2H) . . .

### Example 8

### (S)-6,6′-((2-(((2-(2-(4-Isothiocyanatophenoxy)ethoxy)ethyl)thio)methyl)-1,4,10,13-tetraoxa-7,16-diazacyclooctadecane-7,16-diyl)bis(methylene))dipicolinic acid

[chemical structure]

[chemical structure]

[chemical structure]

[0646] Scheme 7a, Step la: A stir bar, tert-butyl (4-hydroxyphenyl)carbamate (4.5 g, 22 mmol), 1-bromo-2-(2-bromoethoxy)ethane (5.0 g, 22 mmol), K₂CO₃ (4.6 g, 43 mmol) and ACN (45 mL) were added to a 250 mL three-neck round-bottomed flask under nitrogen atmosphere, and the resultant reaction mixture was heated at 80° C. for 16 h under nitrogen atmosphere. Reaction mixture was cooled to room temperature, filtered through Celite®, and concentrated to dryness in vacuo to yield a concentrate which was purified by silica gel chromatography (0-20% EtO Ac/pet ether) to afford product tert-butyl (4-(2-(2-bromoethoxy)ethoxy)phenyl)carbamate (2.0 g,).

[0647] Step 2a: A stir bar, tert-butyl (4-(2-(2-bromoethoxy)ethoxy)phenyl)carbamate (2.0 g, 5.6 mmol), ethanethioic S-acid (0.42 g, 5.6 mmol), K₂CO₃ (1.5 g, 11 mmol) and ACN (50 mL) were added to a 250 mL three-neck round-bottomed flask under nitrogen atmosphere. The reaction mixture stirred at 80° C. for 2 h, and then cooled to room temperature, filtered through Celite®, and concentrated to dryness in vacuo. The concentrate was purified using neutral alumina chromatography (0-50% EtOAc/pet ether) to yield S-(2-(2-(4-((tert-butoxycarbonyl)amino) phenoxy)ethoxy)ethyl)ethanethioate (1.8 g).

[0648] Step 3a: A stir bar, S-(2-(2-(4-((tert-butoxycarbonyl)amino) phenoxy)ethoxy)ethyl)ethanethioate (1.8 g, 5.1 mmol), ethanol (20 mL) and hydrazine monohydrate (0.24 g, 0.24 mL, 7.6 mmol) were added to a 250 mL single-neck round-bottomed flask under nitrogen, and stirred at 80° C. for 1 h. The reaction mixture was then cooled to room temperature and concentrated to dryness in vacuo, to yield a concentrate which was purified via silica gel chromatography (5-10% EtO Ac/pet ether) to yield tert-butyl (4-(2-(2-mercaptoethoxy)ethoxy)phenyl)carbamate (0.5 g) as a colorless oil.

[0649] Scheme 7, Step 1: A solution consisting of tert-butyl (4-(2-(2-mercaptoethoxy)ethoxy)phenyl)carbamate (0.40 g, 1.0 mmol) and DMF (3.0 mL) was added dropwise over 5 minutes to a 50 mL three-neck round-bottomed flask containing a suspension of sodium hydride (0.060 g, 60% in mineral oil, 1.5 mmol) in DMF (3.0 mL) at 0° C. and a under nitrogen atmosphere. Once addition was complete, the reaction mixture was warmed to room temperature and stirred for 15 minutes. The mixture was re-cooled to 0° C. and a solution consisting of dimethyl 6,6′-((2-(((methylsulfonyl)oxy)methyl)-1,4,10,13-tetraoxa-7,16-diazacyclooctadecane-7,16-diyl)bis(methylene))(S)-dipicolinate (0.5 g, 0.7 mmol) and DMF (3.0 mL) was added dropwise. Once addition was complete, the reaction mixture was slowly warmed to room temperature and stirred 1.5 h. The reaction was slowly treated with sat. NH₄Cl (0.2 mL) and then concentrated to dryness to yield an oil. The oil was purified by preparative HPLC (Column: XBRIDGE C18 19×150 mm 5.0 um; Mobile phase: 0.1% TFA in water/acetonitrile; Flow Rate: 15.0 mL/min) to yield dimethyl 6,6′-((2-(((2-(2-(4-((tert-butoxycarbonyl)amino) phenoxy)ethoxy)ethyl)thio)methyl)-1,4,10,13-tetraoxa-7,16-diazacyclooctadecane-7,16-diyl)bis(methylene))(S)-dipicolinate (0.15 g) as a brown oil. Step 2: A stir bar, dimethyl 6,6′-((2-(((2-(2-(4-((tert-butoxycarbonyl)amino) phenoxy)ethoxy)ethyl)thio)methyl)-1,4,10,13-tetraoxa-7,16-diazacyclooctadecane-7,16-diyl)bis(methylene))(S)-dipicolinate (0.15 g, 0.16 mmol), MeOH (1.0 mL) and HCl in methanol (4 M, 0.80 mL, 3.2 mmol) were added to a 25 mL single-neck round-bottomed flask at 0° C. and then brought to room temperature. and stirred for 3 h. The volatiles were removed in vacuo to yield dimethyl 6,6′-((2-(((2-(2-(4-aminophenoxy)ethoxy)ethyl)thio)methyl)-1,4,10,13-tetraoxa-7,16-diazacyclooctadecane-7,16-diyl)bis(methylene))(S)-dipicolinate (0.12 g), which was used without purification.

[0650] Step 3: A stir bar, dimethyl 6,6′-((2-(((2-(2-(4-aminophenoxy)ethoxy)ethyl)thio)methyl)-1,4,10,13-tetraoxa-7,16-diazacyclooctadecane-7,16-diyl)bis(methylene))(S)-dipicolinate (0.12 g, 0.15 mmol), triethylamine (46 mg, 0.46 mmol), dry DCM (3 mL) and carbon disulfide (17 mg, 0.22 mmol) were added to a pressure vial at room temperature under nitrogen atmosphere. The reaction mixture was subjected to microwave-irradiation (150 W power) at 90° C. for 30 min. The reaction mixture was cooled to room temperature and was diluted with dichloromethane (10 mL), washed successively with water (5 mL), IM HCl (5 mL), and water (5 mL), dried over anhydrous Na₂SO₄ and concentrated to dryness to yield dimethyl 6,6′-((2-(((2-(2-(4-isothiocyanatophenoxy)ethoxy)ethyl)thio)methyl)-1,4,10,13-tetraoxa-7,16-diazacyclooctadecane-7,16-diyl)bis(methylene))(S)-dipicolinate (0.12 g), which was used in the without purification.

[0651] Step 4: A stir bar, dimethyl 6,6′-((2-(((2-(2-(4-isothiocyanatophenoxy)ethoxy)ethyl)thio)methyl)-1,4,10,13-tetraoxa-7,16-diazacyclooctadecane-7,16-diyl)bis(methylene))(S)-dipicolinate (0.12 g, 0.15 mmol) and aqueous HCl (6 N, 0.51 mL, 3.1 mmol) were added to a 10 mL single-neck round-bottomed flask and stirred at 50° C. for 3 h. The reaction mixture was cooled to room temperature, concentrated to dryness in vacuo, and the concentrate was purified via preparative HPLC (Column: XBRIDGE C18 19×150 mm 5.0 um; Mobile phase: 0.1% TFA in water/acetonitrile; Flow Rate: 15.0 mL/min) to yield(S)-6,6′-((2-(((2-(2-(4-isothiocyanatophenoxy)ethoxy)ethyl)thio)methyl)-1,4,10,13-tetraoxa-7,16-diazacyclooctadecane-7,16-diyl)bis(methylene))dipicolinic acid (40 mg, 37%). LC-MS APCI: Calculated for C₃₈H₄₉N₅O₁₀S₂: 799.29; Observed m/z [M+H]⁺799.9. ¹H NMR (400 MHZ, CD₃OD): δ8.23-8.20 (m, 2H), 8.15-8.09 (m, 2H), 7.74-7.71 (m, 2H), 7.19 (d, J=8.80 Hz, 2H), 6.92 (d, J=9.20 Hz, 2H), 4.81 (s, 2H), 4.77 (s, 2H), 4.09-4.11 (m, 4H), 3.92-3.95 (m, 6H), 3.79 (t, J=4.00 Hz, 3H), 3.66-3.71 (m, 16H), 2.70-2.76 (m, 4H).

### Example 9

### (S)-6,6′-((2-(((2-(2-(2-(4-Isothiocyanatophenoxy)ethoxy)ethoxy)ethyl)thio)methyl)-1,4,10,13-tetraoxa-7,16-diazacyclooctadecane-7,16-diyl)bis(methylene))dipicolinic acid

[chemical structure]

[chemical structure]

[chemical structure]

[0652] Scheme 8a, Step 1a: A stir bar, tert-butyl (4-hydroxyphenyl)carbamate (3.5 g, 17 mmol), 1,2-bis(2-bromoethoxy)ethane (4.6 g, 17 mmol), K₂CO₃ (4.6 g, 33 mmol) and ACN (40 mL) were added to a 250 mL three-neck round-bottomed flask, and then stirred at 80° C. for 48 h under a nitrogen atmosphere. The reaction mixture was cooled to room temperature, filtered through Celite® and concentrated to dryness in vacuo to yield a concentrate, which was purified via silica gel chromatography (0-10% MeOH/DCM) to yield tert-butyl (4-(2-(2-(2-bromoethoxy)ethoxy)ethoxy)phenyl)carbamate (4.0 g) as a brown oil.

[0653] Step 2a: A stir bar, tert-butyl (4-(2-(2-(2-bromoethoxy)ethoxy)ethoxy)phenyl)carbamate (4.0 g, 9.9 mmol), ethanethioic S-acid (0.75 g, 9.9 mmol), K₂CO₃ (2.7 g, 20 mmol) and ACN (50 mL) were added to a 250 mL three-neck round-bottomed flask under a nitrogen atmosphere, and the reaction mixture was heated at 60° C. for 2 h under a nitrogen atmosphere. The reaction mixture was cooled to room temperature, filtered through Celite®, concentrated to dryness in vacuo and the concentrate was purified by alumina chromatography (0-50% EtOAc/Pet Ether) to yield S-(2-(2-(2-(4-((tert-butoxycarbonyl)amino) phenoxy)ethoxy)ethoxy)ethyl)ethanethioate (3.0 g) as brown oil.

[0654] Step 3a: A stir bar, S-(2-(2-(2-(4-((tert-butoxycarbonyl)amino) phenoxy)ethoxy)ethoxy)ethyl) ethanethioate (3.0 g, 7.5 mmol), ethanol (50 mL) and hydrazine monohydrate (0.36 g, 0.36 mL, 11 mmol) were added to a 250 mL single-neck round-bottomed flask under nitrogen, and stirred at 80° C. for 1 h. The reaction mixture was cooled to room temperature, concentrated to dryness in vacuo, and the concentrate was purified by silica gel chromatography (5-10% EtOAc/pet ether) to yield tert-butyl (4-(2-(2-(2-mercaptoethoxy)ethoxy)ethoxy)phenyl)carbamate (1.0 g) as a colorless oil.

[0655] Scheme 7, Step 1: A solution consisting of tert-butyl (4-(2-(2-(2-mercaptoethoxy)ethoxy)ethoxy)phenyl)carbamate (0.40 g, 1.0 mmol) and DMF (3.0 mL) was added dropwise over 5 minutes to a 50 mL three-neck round-bottomed flask containing a suspension of sodium hydride (0.060 g, 60% in mineral oil, 1.5 mmol) in DMF (3.0 mL) at 0° C. under nitrogen atmosphere. Once addition was complete, the reaction mixture brought to room temperature and stirred continuously for 15 minutes. The mixture was re-cooled to 0° C. and a solution consisting of dimethyl 6,6′-((2-(((methylsulfonyl)oxy)methyl)-1,4,10,13-tetraoxa-7,16-diazacyclooctadecane-7,16-diyl)bis(methylene))(S)-dipicolinate (0.5 g, 0.7 mmol) and DMF (3.0 mL) was added dropwise over 10 minutes. Once addition was complete, the reaction mixture was slowly warmed to room temperature and stirred for 1.5 h. The reaction mixture was then slowly treated with sat. aqueous NH₄Cl (0.2 mL) and concentrated to dryness to yield an oil. The oil was purified by preparative HPLC (Column: XBRIDGE C18 (19×150 mm) 5.0 um; Mobile phase: 0.1% TFA in water/acetonitrile; Flow Rate: 15.0 mL/min) to yield dimethyl 6,6′-((2-(((2-(2-(2-(4-((tert-butoxycarbonyl)amino) phenoxy)ethoxy)ethoxy)ethyl)thio)methyl)-1,4,10,13-tetraoxa-7,16-diazacyclooctadecane-7,16-diyl)bis(methylene))(S)-dipicolinate (0.15 g, 21%) as a brown oil. Step 2: A stir bar, dimethyl 6,6′-((2-(((2-(2-(2-(4-((tert-butoxycarbonyl)amino) phenoxy)ethoxy)ethoxy)ethyl)thio)methyl)-1,4,10,13-tetraoxa-7,16-diazacyclooctadecane-7,16-diyl)bis(methylene))(S)-dipicolinate (0.15 mg, 0.16 mmol), MeOH (1.0 mL) and HCl in methanol (4 M, 0.80 mL, 3.2 mmol) were added to a 25 mL single-neck round-bottomed flask at 0° C. The reaction mixture was allowed to warm to room temperature and stirred for 3 h. The volatiles were removed in vacuo to give yield dimethyl 6,6′-((2-(((2-(2-(2-(4-aminophenoxy)ethoxy)ethoxy)ethyl)thio)methyl)-1,4,10,13-tetraoxa-7,16-diazacyclooctadecane-7,16-diyl)bis(methylene))(S)-dipicolinate (0.12 g), which was used in the next step without purification.

[0656] Step 3: A stir bar, dimethyl 6,6′-((2-(((2-(2-(2-(4-aminophenoxy)ethoxy)ethoxy)ethyl)thio)methyl)-1,4,10,13-tetraoxa-7,16-diazacyclooctadecane-7,16-diyl)bis(methylene))(S)-dipicolinate (0.12 g, 0.14 mmol), triethylamine (44 mg, 0.43 mmol) dry DCM (5 mL) and carbon disulfide (17 mg, 0.22 mmol) were added to a microwave vial at room temperature under a nitrogen atmosphere. The reaction mixture subjected to microwave irradiation (150 W power) at 90° C. for 30 min. The reaction mixture was then cooled to room temperature, diluted with dichloromethane (10 mL), washed successively with water (5 mL), 1M HCl (5 mL), and water (5 mL), dried over anhydrous Na₂SO₄ and concentrated to dryness to yield dimethyl 6,6′-((2-(((2-(2-(2-(4-isothiocyanatophenoxy)ethoxy)ethoxy)ethyl)thio)methyl)-1,4,10,13-tetraoxa-7,16-diazacyclooctadecane-7,16-diyl)bis(methylene))(S)-dipicolinate (0.12 g), which was used in the next step without purification.

[0657] Step 4: A stir bar, dimethyl 6,6′-((2-(((2-(2-(2-(4-isothiocyanatophenoxy)ethoxy)ethoxy)ethyl)thio)methyl)-1,4,10,13-tetraoxa-7,16-diazacyclooctadecane-7,16-diyl)bis(methylene))(S)-dipicolinate (0.12 mg, 0.14 mmol) and aqueous HCl (6 N, 0.50 mL, 2.8 mmol) were added to a 10 mL single-neck round-bottomed flask and stirred at 50° C. for 3 h. The reaction mixture was cooled to room temperature, concentrated to dryness in vacuo to yield a residue which was purified by preparative HPLC (Column: XBRIDGE C18 19×150 mm 5.0 um; Mobile phase: 0.1% TFA in water/acetonitrile; Flow Rate: 15.0 mL/min) to yield(S)-6,6′-((2-(((2-(2-(2-(4-isothiocyanatophenoxy)ethoxy)ethoxy)ethyl)thio)methyl)-1,4,10,13-tetraoxa-7,16-diazacyclooctadecane-7,16-diyl)bis(methylene))dipicolinic acid (50 mg). LC-MS APCI: Calculated for C₄₀H₅₃N₅O₁₁S₂: 843.32; Observed m/z [M+H]⁺843.9. ¹H NMR (400 MHZ, CD₃OD): δ8.24-8.21 (m, 2H), 8.21-8.11 (m, 2H), 7.74 (d, J=7.60 Hz, 2H), 7.23-7.20 (m, 2H), 6.97-6.95 (m, 2H), 4.84-4.79 (m, 5H), 4.14-4.12 (m, 4H), 3.97-3.94 (m, 6H), 3.83-3.59 (m, 23H), 2.75-2.67 (m, 4H).

### Example 10

### 6-((4-((2-(2-(2-Aminoethoxy)ethoxy)ethyl)carbamoyl)phenyl)(16-((6-carboxypyridin-2-yl)methyl)-1,4,10,13-tetraoxa-7,16-diazacyclooctadecan-7-yl)methyl)picolinic acid

[chemical structure]

[chemical structure]

[0658] Step 1: A stir bar, 4-((6-(methoxycarbonyl)pyridin-2-yl)(16-((6-(methoxycarbonyl)pyridin-2-yl)methyl)-1,4,10,13-tetraoxa-7,16-diazacyclooctadecan-7-yl)methyl)benzoic acid (0.40 g, 0.60 mmol), tert-butyl (2-(2-(2-aminoethoxy)ethoxy)ethyl)carbamate (0.15 g, 0.60 mmol), triethylamine (0.18 g, 0.76 mmol), HATU (0.33 g, 0.90 mmol), and DCM (4.0 mL) were added to a 25 mL three-neck round-bottomed flask at 0° C. under a nitrogen atmosphere. The mixture was stirred overnight at room temperature and diluted with water (10 mL), and extracted with dichloromethane (10 mL×3). The combined extracts were washed with 10% aqueous NaHCO₃ (10 mL) and brine (10 mL), dried over anhydrous Na₂SO₄, filtered, and concentrated to dryness to yield a concentrate, which was purified via silica gel chromatography (0-10% MeOH/DCM) to yield methyl 6-((4-((2,2-dimethyl-4-oxo-3,8,11-trioxa-5-azatridecan-13-yl)carbamoyl)phenyl)(16-((6-(methoxycarbonyl)pyridin-2-yl)methyl)-1,4,10,13-tetraoxa-7,16-diazacyclooctadecan-7-yl)methyl)picolinate (0.18 g).

[0659] Step 2: A stir bar, methyl 6-((4-((2,2-dimethyl-4-oxo-3,8,11-trioxa-5-azatridecan-13-yl)carbamoyl)phenyl)(16-((6-(methoxycarbonyl)pyridin-2-yl)methyl)-1,4,10,13-tetraoxa-7,16-diazacyclooctadecan-7-yl)methyl)picolinate (0.18 g, 0.20 mmol), MeOH (1.8 mL), and HCl in methanol (4 M, 1.0 mL, 4.0 mmol) were added to a 10 mL single-neck round-bottomed flask at 0° C., and then brought to room temperature and stirred for 2 h. The volatiles were removed in vacuo to yield methyl 6-((4-((2-(2-(2-aminoethoxy)ethoxy)ethyl)carbamoyl)phenyl)(16-((6-(methoxycarbonyl)pyridin-2-yl)methyl)-1,4,10,13-tetraoxa-7,16-diazacyclooctadecan-7-yl)methyl)picolinate (0.15 g), which was used without purification.

[0660] Step 3: A stir bar, methyl 6-((4-((2-(2-(2-aminoethoxy)ethoxy)ethyl)carbamoyl)phenyl)(16-((6-(methoxycarbonyl)pyridin-2-yl)methyl)-1,4,10,13-tetraoxa-7,16-diazacyclooctadecan-7-yl)methyl)picolinate (0.1 g, 0.1 mmol), aqueous LiOH (3 mL, 0.1 N, 0.3 mmol), and MeOH (1.0 mL) were added to an 8 mL reaction vial at room temperature and stirred overnight. The reaction mixture was adjusted to pH˜6.5 with acetic acid, and then concentrated to dryness in vacuo at room temperature to yield a concentrate, which was purified via preparative HPLC (Column;
[0661] XBRIDGE C18 19×150 mm, 5.0 um; Mobile phase: 0.1% TFA in water/ACN; Flow Rate: 15.0 mL/min) to yield 6-((4-((2-(2-(2-aminoethoxy)ethoxy)ethyl)carbamoyl)phenyl)(16-((6-carboxypyridin-2-yl)methyl)-1,4,10,13-tetraoxa-7,16-diazacyclooctadecan-7-yl)methyl)picolinic acid (40 mg). LC-MS APCI: Calculated for C₃₉H₅₄N₆O₁₁; 782.39; Observed m/z [M+H]⁺783.0.

### Example 11

### 6,6′-((18-(((2-(2-Aminoethoxy)ethyl)thio)methyl)tetradecahydro-4H,13H,17H-cyclopenta[b][1,4,10,13]tetraoxa[7,16]diazacyclooctadecine-4,13-diyl)bis(methylene))dipicolinic acid and

### Example 12

### N-acyl-DBCO tagged 6,6′-((18-(((2-(2-Aminoethoxy)ethyl)thio)methyl)tetradecahydro-4H, 13H, 17H-cyclopenta[b][1,4,10,13]tetraoxa[7,16]diazacyclooctadecine-4,13-diyl)bis(methylene))dipicolinic acid

[chemical structure]

[chemical structure]

[chemical structure]

[chemical structure]

[0662] Step 1: A stir bar, methyl cyclopent-3-ene-1-carboxylate (25.0 g, 198 mmol), THF (600 mL), methanol (12.6 g, 16.0 mL, 397 mmol) and lithium borohydride (198 mL, 2.0 M in THF, 397 mmol) were added to a 3000 mL three-neck round-bottomed flask at 0° C. Once addition was complete, the reaction mixture was stirred at 70° C. for 6 h. The reaction mixture was then cooled to room temperature, slowly treated with ice water (250 mL), cooled further to 0° C., brought to PH˜2 with 1.5 N HCl (pH˜2) and then extracted with DCM (1000 mL×3). The combined extracts were washed with water (500 mL), dried over anhydrous Na₂SO₄, filtered and concentrated to dryness to yield a concentrate which was purified by silica gel chromatography (50-80% EtOAc/pet ether) to yield cyclopent-3-en-1-ylmethanol (13.8g).

[0663] Step 2: A solution consisting of cyclopent-3-en-1-ylmethanol (13.7 g, 139 mmol) and DMF (50 mL) was added dropwise over 30 min into a 1000 mL three-neck round-bottomed flask containing a suspension of sodium hydride (6.69 g, 60% in mineral oil, 167 mmol) in DMF (50 mL) at 0° C. under nitrogen atmosphere. Once addition was complete, the reaction mixture was slowly warmed to room temperature and stirring continued for 30 min. The mixture was then re-cooled to 0° C. and treated dropwise over 15 min with a solution consisting of benzyl bromide (19.8 g, 167 mmol) and DMF (50 mL). Once addition was complete, the reaction mixture was slowly warmed to room temperature and then stirred for 16 h. The reaction mixture was slowly treated with sat. aqueous NH₄Cl (50 mL) and then extracted with ethyl acetate (1000 mL×3). The combined extracts were washed with water (500 mL×3), dried over anhydrous Na₂SO₄, filtered, and concentrated to dryness to yield a concentrate. The concentrate was purified by silica gel chromatography (0-20% EtOAc/pet ether) to yield ((cyclopent-3-en-1-ylmethoxy)methyl)benzene (21.0 g).

[0664] Step 3: A stir bar, NMO (38.0 g, 50% wt in H₂O, 158 mmol), THF (180 mL) and osmium tetroxide (16.2 g, 3.21 mL, 2.5% wt % in t-butanol, 0.158 mmol) were added to a 1000 mL three-neck round-bottomed flask at 0° C. The reaction mixture was brought to room temperature, stirred for 10 min and re-cooled to 0° C. Once cooled, the mixture was treated dropwise over 15 min with a solution of ((cyclopent-3-en-1-ylmethoxy)methyl)benzene (20.0 g, 158 mmol) and THF (180 mL). The reaction was brought to room temperature and stirred for 16 h before it was slowly treated with sat. aqueous NaHCO₃ (100 mL) and extracted with DCM (1000 mL× 3). The combined extracts were washed with water (500 mL), dried over anhydrous Na₂SO₄, filtered, and concentrated to dryness to yield a concentrate, which was purified via silica gel chromatography (0-20% EtO Ac/pet ether) to yield an isomeric mixture of 4-((benzyloxy)methyl)cyclopentane-1,2-diol as a colorless oil. The isomers were separated via SFC (Instrument: PIC 100; Column: Chiralpak OXH (250×30) mm, 5 μm; Mobile phase: CO₂: 0.5% isopropyl amine in IPA (60:40); Total flow: 70 g/min; Back pressure: 100 bar; Wave length: 220 nm; Cycle time: 8.0 min) yielded both cis -1,2 isomers of 4-((benzyloxy)methyl)cyclopentane-1,2-diol: 1^{st} eluting isomer (10 g) and 2^{nd} eluting isomer (5 g).

[0665] Step 4: A solution consisting of the 1^{st}-eluting isomer of 4-((benzyloxy)methyl)cyclopentane-1,2-diol (10.0 g, 45.0 mmol) and DMF (60 mL) was added dropwise over 1 h to a 250 mL three-neck round-bottomed flask containing a suspension of sodium hydride (8.62 g, 60% in mineral oil, 225 mmol) in DMF (60 mL) at 0° C. under a nitrogen atmosphere. Once addition was complete, the reaction mixture brought to room temperature and stirred for 30 min. The mixture was then re-cooled to 0° C. and treated dropwise over 15 min with a solution consisting of 2-(2-bromoethoxy)tetrahydro-2H-pyran (47.0 g, 225 mmol) and DMF (60 mL). Once addition was complete, the reaction mixture was slowly warmed to room temperature and stirred for 2 h. The mixture was then slowly treated with sat. aqueous NH₄Cl (50 mL) and then extracted with ethyl acetate (500 mL×3). The combined extracts were washed with water (500 mL), dried over anhydrous Na₂SO₄, filtered, and concentrated to dryness to yield an oil, which was purified by silica gel chromatography (0-30% EtOAc/pet ether) to yield 2,2′-((((4-((benzyloxy)methyl)cyclopentane-1,2-diyl)bis(oxy))bis(ethane-2,1-diyl))bis(oxy))bis(tetrahydro-2H-pyran) (21.0 g).

[0666] Step 5: A stir bar, 2,2′-((((4-((benzyloxy)methyl)cyclopentane-1,2-diyl)bis(oxy))bis(ethane-2,1-diyl))bis(oxy))bis(tetrahydro-2H-pyran) (29.0 g, 61.0 mmol), MeOH (200 mL) and HCl in 1,4-dioxane (4 M, 3.0 mL, 12.0 mmol) were added to a 1000 mL three-neck round-bottomed flask and then heated at reflux for 1 h. The flask was then cooled to room temperature and the volatiles removed in vacuo to yield 2,2′-((4-((benzyloxy)methyl)cyclopentane-1,2-diyl)bis(oxy))bis(ethan-1-ol) (20.0 g) as a residue, which was used without purification.

[0667] Step 6: A stir bar, 2,2′-((4-((benzyloxy)methyl)cyclopentane-1,2-diyl)bis(oxy))bis(ethan-1-ol) (20.0 g) (20.0 g, 64.4 mmol), DCM (200 mL) and triethylamine (32.6 mL, 322 mmol) were added to a 1000 mL round-bottomed flask under a nitrogen atmosphere, and the resulting mixture was cooled to 10° C. The mixture was then treated with pTsCl (36.9 g, 193 mmol) which was added portion-wise and then brought to room temperature. Once addition was complete the reaction mixture was stirred for 16 h during which time a precipitate formed. The mixture was then diluted with DCM (500 mL), washed with cold aq. HCl (1 M, 500 mL×3) and ice-cold water (500 mL×2), dried over anhydrous Na₂SO₄, filtered, and concentrated to dryness to yield a residue which was purified via silica gel chromatography (0-30% EtOAc/pet ether) to yield ((4-((benzyloxy)methyl)cyclopentane-1,2-diyl)bis(oxy))bis(ethane-2,1-diyl)bis(4-methylbenzenesulfonate) (26.0 g).

[0668] Step 7: A stir-bar, N,N′-((ethane-1,2-diylbis(oxy))bis(ethane-2,1-diyl))bis(4-methylbenzenesulfonamide) (21.0 g, 42.0 mmol), Cs₂CO₃ (41.3 g, 126 mmol) and dry DMF (250 mL) were added to a 2000 mL three-neck round-bottomed flask under nitrogen atmosphere, and the resultant heterogeneous mixture stirred at room temperature for 1.5 h. The mixture was then treated dropwise with a solution consisting of ((4-((benzyloxy)methyl)cyclopentane-1,2-diyl)bis(oxy))bis(ethane-2,1-diyl)bis(4-methylbenzenesulfonate) (26.0 g, 42.0 mmol) and DMF (250 mL) over a period of 2 h. Stirring was continued for 20 h, before the mixture was concentrated to dryness in vacuo to yield a paste-like solid. The paste was suspended in DCM (1000 mL), stirred for 30 min, and filtered by vacuum filtration. The filtrate was concentrated to dryness in vacuo to yield a concentrate, which was purified by silica gel chromatography (0-40% EtO Ac/pet ether) to yield 18-((benzyloxy)methyl)-4,13-ditosyltetradecahydro-2H, 11H,17H-cyclopenta[b][1,4,10,13]tetraoxa[7,16]diazacyclooctadecine (24 g).

[0669] Step 8: A HOAc solution of HBr (50%, 112 mL, 695 mmol) was added to a 500 mL round-bottomed flask containing a stir bar and 18-((benzyloxy)methyl)-4,13-ditosyltetradecahydro-2H, 11H, 17H-cyclopenta[b][1,4,10,13]tetraoxa[7,16]diazacyclooctadecine (24.0 g, 32.8 mmol) under a nitrogen atmosphere. The mixture was stirred at room temperature until homogeneous and then treated with phenol (16.3 g, 174 mmol). The reaction mixture was then heated at 60° C. for 6 h, before cooling to room temperature and concentrating to dryness in vacuo to yield a concentrate. The concentrate was purified via reverse-phase column chromatography (Column;
[0670] Revelries C18-330 g; Mobile phase A: 0.1% TFA in water, Mobile phase B: acetonitrile; Flow rate: 60 mL/min) to yield (tetradecahydro-2H,11H,17H-cyclopenta[b][1,4,10,13]tetraoxa[7,16]diazacyclooctadecin-18-yl)methyl acetate (8.0 g). Step 9: A stir bar, (tetradecahydro-2H,11H,17H-cyclopenta[b][1,4,10,13]tetraoxa[7,16]diazacyclooctadecin-18-yl)methyl acetate (8.0 g, 21 mmol), methyl 6-(chloromethyl)picolinate (12.2 g, 53.2 mmol), Na₂CO₃ (11.1 g, 106 mmol) and acetonitrile (100 mL) were added to a 500 mL three-neck round-bottomed flask under a nitrogen atmosphere, and the resultant heterogeneous mixture heated at 90° C. for 16 h under a nitrogen atmosphere. The resulting mixture was then cooled to room temperature, filtered through a pad of Celite®, and the filtrate concentrated to dryness in vacuo to yield a concentrate. The concentrate was subjected to silica gel chromatography (0-10% MeOH/DCM) to yield dimethyl 6,6′-((18-(acetoxymethyl)tetradecahydro-4H,13H,17H-cyclopenta[b][1,4,10,13]tetraoxa[7,16]diazacyclooctadecine-4,13-diyl)bis(methylene))dipicolinate (5.0 g).

[0671] Step 10: A stir bar, dimethyl 6,6′-((18-(acetoxymethyl)tetradecahydro-4H, 13H,17H-cyclopenta[b][1,4,10,13]tetraoxa[7,16]diazacyclooctadecine-4,13-diyl)bis(methylene))dipicolinate (5.0 g, 7.4 mmol), K₂CO₃ (0.10 g, 0.74 mmol) and methanol (50 mL) were added to a 250 mL round-bottomed flask under nitrogen atmosphere, and the resulting mixture was stirred at room temperature for 10 min. The mixture was then concentrated to dryness in vacuo and the resulting residue purified by silica gel chromatography (0-10% MeOH/DCM) to yield 6,6′-((18-(hydroxymethyl)tetradecahydro- 4H,13H, 17H-cyclopenta[b][1,4,10,13]tetraoxa[7,16]diazacyclooctadecine-4,13-diyl)bis(methylene))dipicolinate (3.0 g).

[0672] Step 11: A stir bar, 6,6′-((18-(hydroxymethyl)tetradecahydro-4H,13H,17H-cyclopenta[b][1,4,10,13]tetraoxa[7,16]diazacyclooctadecine-4,13-diyl)bis(methylene))dipicolinate (2.0 g, 3.1 mmol), DCM (20 mL) and triethylamine (1.2 g, 9.5 mmol) were added to a 100 mL three-neck round-bottomed flask under a nitrogen atmosphere, and the resulting mixture cooled to 10° C. The mixture was treated with MsCI (0.48 g, 6.3 mmol) portion wise, and once addition was complete, the reaction vessel was brought to room temperature and stirred for 30 minutes, during which time a precipitate formed. The heterogeneous mixture was then diluted with DCM (50 mL), washed with cold aq. HCl (1 M, 50 mL×3) and ice-cold water (50 mL× 2), dried over anhydrous Na₂SO₄, filtered, and concentrated to dryness to yield a gummy solid. The gummy solid was purified by neutral alumina column chromatography (0-10% MeOH/DCM) to yield dimethyl 6,6′-((18-(((methylsulfonyl)oxy)methyl)tetradecahydro-4H,13H,17H-cyclopenta[b][1,4,10,13]tetraoxa[7,16]diazacyclooctadecine-4,13-diyl)bis(methylene))dipicolinate (1.5 g).

[0673] Step 12: A solution consisting of dimethyl 6,6′-((18-(((methylsulfonyl)oxy)methyl)tetradecahydro-4H,13H, 17H-cyclopenta[b][1,4,10,13]tetraoxa[7,16]diazacyclooctadecine-4,13-diyl)bis(methylene))dipicolinate (0.69 g, 3.2 mmol) and DMF (5 mL) was added dropwise over 5 minutes to a 25 mL three-neck round-bottomed flask containing a suspension of sodium hydride (162 mg, 60% in mineral oil, 4.22 mmol) in DMF (0.5 mL), at 0° C. under nitrogen atmosphere. Once addition was complete, the reaction mixture was brought to room temperature and stirred 15 minutes. The reaction mixture was then re-cooled to 0° C. and treated dropwise over 5 minutes with a solution consisting of tert-butyl (2-(2-mercaptoethoxy)ethyl)carbamate (1.50 g, 2.11 mmol) and DMF (3 mL). Once addition was complete, the reaction mixture was slowly warmed to room temperature and then stirred for 1 h. The reaction was then slowly treated with sat. NH₄Cl and subsequently extracted with ethyl acetate (10 mL×3). The combined extracts were washed with water (10 mL), dried over anhydrous Na₂SO₄, filtered, and concentrated to dryness to yield an oil. The oil was purified via preparative HPLC (Column: XBRIDGE C18 19×150 m) 5.0 μm; Mobile phase: 0.1% TFA in water/acetonitrile; Flow Rate: 15.0 mL/min) to yield cyclopenta[b][1,4,10,13]tetraoxa[7,16]diazacyclooctadecine-4,13-diyl)bis(methylene))dipicolinate (0.2 g).

[0674] Step 13: A stir bar, cyclopenta[b][1,4,10,13]tetraoxa[7,16]diazacyclooctadecine-4,13-diyl)bis(methylene))dipicolinate (0.20 g, 0.24 mmol), MeOH (1.0 mL), and HCl in methanol (4 M, 1.2 mL, 4.8 mmol) were added to a 25 mL single-neck round-bottomed flask at 0° C. and the resulting mixture brought to room temperature, and stirred for 2 h. The volatiles were removed in vacuo to yield dimethyl 6,6′-((18-(((2-(2-aminoethoxy)ethyl)thio)methyl)tetradecahydro-4H, 13H,17H-cyclopenta[b][1,4,10,13]tetraoxa[7,16]diazacyclooctadecine-4,13-diyl)bis(methylene))dipicolinate (150 mg), which was used without purification.

[0675] Step 14: A stir bar, dimethyl 6,6′-((18-(((2-(2-aminoethoxy)ethyl)thio)methyl)tetradecahydro-4H,13H,17H-cyclopenta[b][1,4,10,13]tetraoxa[7,16]diazacyclooctadecine-4,13-diyl)bis(methylene))dipicolinate (40 mg, 0.054 mmol), aqueous LiOH (1.6 mL, 0.1 N, 0.16 mmol) and MeOH (0.5 mL) were added to an 8 mL reaction vial at room temperature and the resulting mixture was stirred overnight. The pH of the reaction mixture was adjusted with acetic acid to pH˜6.5 and then concentrated to dryness in vacuo at room temperature, and the resultant concentrate was purified by preparative HPLC (Column: XBRIDGE C18 19×150 mm 5.0 μm; Mobile phase: 10 Mm Ammonium Acetate in water/ACN; Flow Rate: 15.0 mL/min) to yield

[0676] Example 11:6,6′-((18-(((2-(2-aminoethoxy)ethyl)thio)methyl)tetradecahydro-4H,13H, 17H-cyclopenta[b][1,4,10,13]tetraoxa[7,16]diazacyclooctadecine-4,13-diyl)bis(methylene))dipicolinic acid (23 mg). LC-MS APCI: Calculated for C₃₄H₅₁N₅O₉S; 705.34; Observed m/z [M+H]⁺706.4.

[0677] Step 15: A stir bar, dimethyl 6,6′-((18-(((2-(2-aminoethoxy)ethyl)thio)methyl)tetradecahydro-4H, 13H,17H-cyclopenta[b][1,4,10,13]tetraoxa[7,16]diazacyclooctadecine-4,13-diyl)bis(methylene))dipicolinate (70 mg, 0.95 mmol),11,12-Didehydro-y-oxodibenz [b,f]azocine-5 (6H)-butanoic acid (29 mg, 0.95 mmol), triethylamine (29 mg, 0.76 mmol), HATU (54 mg, 0.14 mmol) and DCM (0.5 mL) were added to a 25 mL three-neck round-bottomed flask at 0° C. under a nitrogen atmosphere. The resulting mixture was brought to room temperature and stirred overnight. The reaction mixture was diluted with water (10 mL) and the extracted with dichloromethane (10 mL×3). The combined extracts were washed with 10% aqueous NaHCO₃ (10 mL) and brine (10 mL), dried over anhydrous Na₂SO₄, filtered, and concentrated to dryness to yield an oil. The oil was purified via silica gel chromatography (0-10% MeOH/DCM) to yield N-acyl-DBCO tagged dimethyl 6,6′-((18-(((2-(2-aminoethoxy)ethyl)thio)methyl)tetradecahydro-4H,13H,17H-cyclopenta[b][1,4,10,13]tetraoxa[7,16]diazacyclooctadecine-4,13-diyl)bis(methylene))dipicolinate (10 mg).

[0678] Step 16: A stir bar, N-acyl-DBCO tagged dimethyl 6,6′-((18-(((2-(2-aminoethoxy)ethyl)thio)methyl)tetradecahydro-4H,13H, 17H-cyclopenta[b][1,4,10,13]tetraoxa[7,16]diazacyclooctadecine-4,13-diyl)bis(methylene))dipicolinate (10 mg, 0.01 mmol), aqueous LiOH (0.3 mL, 0.1 N, 0.03 mmol) and methanol (0.25 mL) were added to an 8 mL reaction vial at room temperature and the resultant mixture stirred overnight. The reaction mixture was adjusted to pH˜6.5 with acetic acid, concentrated to dryness in vacuo at room temperature, and the resultant concentrate was purified by preparative HPLC (Column: XBRIDGE C18 (19×150 mm) 5.0 μm; Mobile phase: 10 Mm Ammonium Acetate in water/ACN; Flow Rate: 15.0 mL/min) to yield Example 12: N-acyl-DBCO tagged 6,6′-((18-(((2-(2-aminoethoxy)ethyl)thio)methyl)tetradecahydro-4/,13H,17H-cyclopenta[b][1,4,10,13]tetraoxa[7,16]diazacyclooctadecine-4,13-diyl)bis(methylene))dipicolinic acid (3 mg). LC-MS APCI: Calculated for C₅₃H₆₄N₆O₁₁S; 992.44; Observed m/z [M−H]⁻: 991.4.

### Example 13

### 6-((16-(1-(6-carboxypyridin-2-yl)-8-isothiocyanatooctyl)-1,4,10,13-tetraoxa-7,16-diazacyclooctadecan-7-yl)methyl)picolinic acid

[chemical structure]

[chemical structure]

[chemical structure]

[0679] Step 1: Into a 500-mL 3-necked round-bottom flask, purged and maintained under an inert atmosphere of nitrogen, was placed a solution of 8-((tert-butoxycarbonyl)amino) octanoic acid (20.0 g, 77.1 mmol) in dichloromethane (200 mL), N, O-dimethylhydroxylamine (7.0 g, 115 mmol), diisopropylethylamine (29.90 g, 231 mmol). This was followed by the addition of HATU (43.9 g, 115 mmol) with stirring at 0° C. The resulting solution was stirred for 1 h. at room temperature. The reaction was then quenched by the addition of 200 mL of water. The resulting solution was extracted with dichloromethane (100 mL×2). The combined organic layers were washed sequentially with HCl (1 M) (300 mL×2), NH₄+CO₃ aqueous solution (400 mL×3) and bine (400 mL). After it was dried over anhydrous Na₂SO₄, it was concentrated to give tert-butyl (8-(methoxy(methyl)amino)-8-oxooctyl)carbamate (15.4 g, 66% yield) as light-yellow oil. Step 2: Into a 500-mL 3-necked round-bottom flask, purged and maintained under an inert atmosphere of nitrogen, was placed a solution of 2,6-dibromopyridine (23.0 g, 927 mmol) in THF (400 mL). It was cooled to −78° C. and n-BuLi (60.4 mL, 927 mmol) was added dropwise quickly. After stirring for 10 min, an addition of tert-butyl (8-(methoxy(methyl)amino)-8-oxooctyl)carbamate (14.0 g, 463.5 mmol) in THF (40 mL) was added dropwise with stirring at-78° C. The resulting solution was stirred for 30 min. at room temperature. The reaction was quenched by the addition of 500 mL of water. The resulting solution was extracted with ethyl acetate (200 mL×2). The combined organic layers were washed with brine (400 mL), dried over anhydrous sodium sulfate and concentrated to give the crude product. Chromatography on silica gel ((0-10% ethyl acetate in petroleum ether) gave tert-butyl (8-(6-bromopyridin-2-yl)-8-oxooctyl)carbamate (11.8 g, 50% yield) as light yellow solid.

[0680] Step 3: Into a 1-L high pressure reactor, maintained with an inert atmosphere of nitrogen, was placed a solution of tert-butyl (8-(6-bromopyridin-2-yl)-8-oxooctyl)carbamate (11.5 g, 28.8 mmol, 1.0 eq.) in MeOH (500 mL), followed by Pd (dppf)Cl2 (2.1 g, 2.88 mmol), TEA (8.7 g, 86.4 mmol). Then CO (20 atm) was introduced in. The resulting solution was stirred for 16 h at 100° C. The reaction solution was filtered and used for next step directly.

[0681] Step 4: The MeOH solution received from above was cooled to 0° C. and NaBH₄ (1.08 g, 28.8 mmol) was added. The resulting solution was stirred for 1 h. at room temperature. The reaction was quenched by the addition of 500 mL of NH₄CO₃ aqueous solution and extracted with ethyl acetate (300 mL×2). The combined organic layers were washed with brine (600 mL), dried over anhydrous Na₂SO₄ and concentrated to give methyl 6-(8-((tert-butoxycarbonyl)amino)-1-hydroxyoctyl)picolinate (10 g) as brown oil.

[0682] Step 5: Into a 250-mL 3-necked round-bottom flask, purged and maintained under an inert atmosphere of nitrogen, was placed a solution of methyl 6-(8-((tert-butoxycarbonyl)amino)-1-hydroxyoctyl)picolinate (10 g) in DCM (100 mL). After it was cooled to 0° C., TEA (7.9 g, 78.9 mmol) and mesyl chloride (3.6 g, 31.5 mmol) were added. The resulting solution was stirred for 1 h. at room temperature. The mixture was concentrated under vacuum. MeCN (100 mL) was added and concentrated under vacuum. The crude product methyl 6-(8-((tert-butoxycarbonyl)amino)-1-((methylsulfonyl)oxy) octyl)picolinate went straight to the next step.

[0683] Step 6: To a solution of the above crude product methyl 6-(8-((tert-butoxycarbonyl)amino)-1-((methylsulfonyl)oxy) octyl)picolinate in ACN (100 mL) was added NaI (4.3 g, 28.9 mmol). The resulting solution was stirred for 1 h at 80° C. The mixture was filtered and concentrated. The crude product was purified by Flash-Prep-HPLC: Column C18; mobile phase, H₂O/ACN=50/50% to H₂O/ACN=20/80% in 30 min; It gave 4 g of methyl 6-(8-((tert-butoxycarbonyl)amino)-1-iodooctyl)picolinate as brown oil.

[0684] Step 7: To a solution of methyl 6-(8-((tert-butoxycarbonyl)amino)-1-iodooctyl)picolinate (3.0 g, 6.12 mmol,) in DCM (200 mL) were added methyl 6-((1,4,10,13-tetraoxa-7,16-diazacyclooctadecan-7-yl)methyl)picolinate (3.0 g, 7.34 mmol), diisopropylethylamine (3.9 g, 30.61 mmol). The resulting solution was stirred for 16 h at 80° C. The reaction was concentrated. The crude product was purified by Flash-Prep-HPLC: Column C18; mobile phase, A: H₂O (0.05% TFA), B: CAN; 20% B to 40% B in 20 min. It gave 1.9 g of methyl 6-(8-((tert-butoxycarbonyl)amino)-1-(16-((6-(methoxycarbonyl)pyridin-2-yl)methyl)-1,4,10,13-tetraoxa-7,16-diazacyclooctadecan-7-yl) octyl)picolinate as brown oil.

[0685] Step 8: To a stirred solution of methyl 6-(8-((tert-butoxycarbonyl)amino)-1-(16-((6-(methoxycarbonyl)pyridin-2-yl)methyl)-1,4,10,13-tetraoxa-7,16-diazacyclooctadecan-7-yl) octyl)picolinate (1.7 g, 2.19 mmol, 77% on LCMS) in DCM (8.5 mL) at 0° C. was added HCl/dioxane dropwise. The resulting solution was stirred for 1 h. at room temperature. The reaction was quenched by the portion wise addition of NH₄CO₃ aqueous solution (20 mL×3). The resulting solution was extracted with dichloromethane (100 mL×2). The combined organic layers were washed brine (400 mL), dried over anhydrous Na₂SO₄ and concentrated to give 1.3 g of methyl 6-(8-amino-1-(16-((6-(methoxycarbonyl)pyridin-2-yl)methyl)-1,4,10,13-tetraoxa-7,16-diazacyclooctadecan-7-yl) octyl)picolinate as brown oil.

[0686] Step 9: To a solution of methyl 6-(8-amino-1-(16-((6-(methoxycarbonyl)pyridin-2-yl)methyl)-1,4,10,13-tetraoxa-7,16-diazacyclooctadecan-7-yl) octyl)picolinate (1.0 g, 1.48 mmol) in DCM (17 mL) under N₂ was added 1, l′-thiocarbonylbis(pyridin-2 (1H)-one) (0.38 g, 1.63 mmol). The resulting solution was stirred for 1 h at room temperature. It was concentrated to give 1.6 g of methyl 6-((16-(1-(6-(methoxycarbonyl)pyridin-2-yl)-8-thiocyanatooctyl)-1,4,10,13-tetraoxa-7,16-diazacyclooctadecan-7-yl)methyl)picolinate as brown oil.

[0687] Step 10: To a solution of methyl 6-((16-(1-(6-(methoxycarbonyl)pyridin-2-yl)-8-thiocyanatooctyl)-1,4,10,13-tetraoxa-7,16-diazacyclooctadecan-7-yl)methyl)picolinate (1.40 g, 1.42 mmol) in ACN (4 mL) was added HCl (6 M) (7 mL). The resulting solution was stirred for 5 h at 50° C. in an oil bath. It was diluted with 10 mL of H₂O. The crude product was purified by Flash-Prep-HPLC: Column, C18; mobile phase, A: H₂O (0.05% TFA), B: ACN, 20% B to 36% B in 20 min; Detector UV@210 nm. The product fractions were concentrated to remove ACN. The aqueous was adjust to pH to 7˜8 with NaHCO₃ aqueous solution. It was purified again on Flash-Prep-HPLC: Column, C18; mobile phase, A: H₂O, B: ACN, 95% B to 100% B in 20 min. The product solution was concentrated to remove CAN and then lyophilized. It gave 190 mg of 6-((16-(1-(6-carboxypyridin-2-yl)-8-thiocyanatooctyl)-1,4,10,13-tetraoxa-7,16-diazacyclooctadecan-7-yl)methyl)picolinic acid as a brown solid. ¹H NMR (300 MHZ, D20) 8 7.91 (s, 4H), 7.54 (s, 2H), 4.52 (d, J=17.9 Hz, 3H), 3.77 (d, J=9.3 Hz, 8H), 3.56-3.41 (m, 18H), 2.11 (s, 2H), 1.51 (s, 2H), 1.17 (s, 7H), 0.97 (s, 1H). MS (ES, m/z): 688.3 (M+H⁺).

### Example 14

### 6-((16-(1-(6-carboxypyridin-2-yl)-2-(2-(2-isothiocyanatoethoxy)ethoxy)ethyl)-1,4,10,13-tetraoxa-7,16-diazacyclooctadecan-7-yl)methyl)picolinic acid

[chemical structure]

[chemical structure]

[chemical structure]

[0688] Step 1: To a stirred solution of 2,2-dimethyl-4-oxo-3,8,11-trioxa-5-azatridecan-13-oic acid (10.00 g, 37.98 mmol) and diisopropylethylamine (14.73 g, 113.94 mmol) in dichloromethane (100 mL) at 0° C. under nitrogen atmosphere was added [Bis(dimethylamino)methylene]-1H-1,2,3-triazolo[4,5-b]pyridinium 3-oxide hexafluorophosphate (15.16 g, 39.88 mmol), N,O-dimethyl hydroxylamine (5.55 g, 56.97 mmol) dropwise. After the resulting mixture was stirred for 1 h at room temperature, it was poured to saturated NH₄Cl (aq.). The resulting mixture was extracted with dichloromethane (100 mL×2). The combined organic layers were washed with brine, dried over anhydrous Na₂SO₄. After filtration, the filtrate was concentrated under reduced pressure. The residue was purified by chromatography: Column, C18; mobile phase A: H₂O with 0.05% TFA, B: ACN; gradient 20% B to 40% B in 20 minutes; Detector: UV@210 nm. It gave tert-butyl (3-methyl-4-oxo-2,6,9-trioxa-3-azaundecan-11-yl)carbamate (9.90 g. 85% yield) as light yellow oil.

[0689] Step 2: To a solution of 2,6-dibromo-pyridine (13.3 g, 56.1 mmol) in THF (260 mL) in a 500 ml 3-necked round-bottom flask at −78° C. under nitrogen atmosphere was added n-BuLi (28.0 mL, 56.1 mmol) dropwise. The solution was stirred at −78° C. for 10 min. A solution of tert-butyl (3-methyl-4-oxo-2,6,9-trioxa-3-azaundecan-11-yl)carbamate (7.0 g, 28.0 mmol) in THF (30 mL) was added dropwise to the reaction solution at −78° C. and the mixture was stirred at room temperature for 30 min. The reaction was quenched by the addition of water/ice (200 mL) at 0° C. The aqueous layer was extracted with ethyl acetate (100 mL×3). The combined extracts were dried over Na₂SO₄ and concentrated under vacuum. The residue was purified by chromatography: Column, C18; mobile phase, mobile phase A: H₂O with 0.05% TFA, B: ACN; gradient 38% B to 58% B in 20 minutes; Detector: UV@210 nm. It gave to tert-butyl (2-(2-(2-(6-bromopyridin-2-yl)-2-oxoethoxy)ethoxy)ethyl)carbamate (4.6 g, 50% yield) as a yellow solid. MS (ES, m/z): 425, 427 (M+Na⁺).

[0690] Step 3: To a 250-mL high pressure reactor were added tert-butyl (2-(2-(2-(6-bromopyridin-2-yl)-2-oxoethoxy)ethoxy)ethyl)carbamate (4.0 g, 18.1 mmol), triethylamine (5.5 g, 54.3 mmol), Pd (dppf)Cl2 (1.3 g, 1.8 mmol) and MeOH (40 mL). The reaction solution was evacuated and backfilled with N₂. Then CO (10 atm) was introduced in. The resulting solution was stirred at 100° C. for overnight. The reaction mixture was filtered, and the filtrate was concentrated to dryness. The residue was purified by chromatography: Column, C18; mobile phase A: H₂O with 0.05% TFA, B: ACN; gradient 38% B to 58% B in 20 minutes; Detector: UV@210 nm. It gave methyl 6-(2,2-dimethyl-4-oxo-3,8,11-trioxa-5-azatridecan-13-oyl)picolinate (2.4 g, 63% yield) as a brown oil. MS (ES, m/z): 405 (M+Na).

[0691] Step 4: To a solution of methyl 6-(2,2-dimethyl-4-oxo-3,8,11-trioxa-5-azatridecan-13-oyl)picolinate (2.30 g, 6.01 mmol) in MeOH (46 mL) under N₂ atmosphere at 0° C. was added NaBH₄ (0.23 g, 6.01 mmol). The resulting solution was stirred for 1 h at room temperature and quenched by the addition of 50 mL of saturated NH₄HCO₃ (aq.). The resulting solution was extracted with ethyl acetate (30 mL×2). The combined organic layers were washed with brine (60 mL), dried over Na₂SO₄ and concentrated. It gave 2.2 g of the crude product methyl 6-(13-hydroxy-2,2-dimethyl-4-oxo-3,8,11-trioxa-5-azatridecan-13-yl)picolinate as brown oil.

[0692] Step 5: To a solution of methyl 6-(13-hydroxy-2,2-dimethyl-4-oxo-3,8,11-trioxa-5-azatridecan-13-yl)picolinate (2.2 g, 5.72 mmol) in dichloromethane (22 mL) at 0° C. under N₂ atmosphere were added triethylamine (1.74 g, 17.16 mmol) and MsCl (0.79 g, 6.86 mmol). The resulting solution was stirred for 1 h at room temperature and quenched with H₂O (22 mL). The resulting mixture was extracted with dichloromethane (20 mL×2). The combined organic layers were washed with brine (40 mL), dried over Na₂SO₄ and concentrated. It gave 2.2 g of the crude product methyl 6-(2,2-dimethyl-13-((methylsulfonyl)oxy)-4-oxo-3,8,11-trioxa-5-azatridecan-13-yl)picolinate as brown oil.

[0693] Step 6: To a solution of methyl 6-(2,2-dimethyl-13-((methylsulfonyl)oxy)-4-oxo-3,8,11-trioxa-5-azatridecan-13-yl)picolinate (2.2 g, 4.75 mmol) in ACN (22 mL) under N₂ atmosphere was added NaI (0.78 g, 5.23 mmol). The resulting solution was stirred for 1 h at 80° C. The mixture was filtered and concentrated. The crude product was purified by chromatography: Column, C18; mobile phase A: H₂O, B: ACN; gradient 50% B to 80% B in 30 min; Detector: UV@210 nm. It gave methyl 6-(13-iodo-2,2-dimethyl-4-oxo-3,8,11-trioxa-5-azatridecan-13-yl)picolinate (1.2 g) as brown oil. MS (ES, m/z): 517 (M+Na), 495 (M+H).

[0694] Step 7: A solution of methyl 6-(13-iodo-2,2-dimethyl-4-oxo-3,8,11-trioxa-5-azatridecan-13-yl)picolinate (840 mg, 1.69 mmol) and methyl 6-((1,4,10,13-tetraoxa-7,16-diazacyclooctadecan-7-yl)methyl)picolinate (839 mg, 2.03 mmol) in ACN (16.8 mL) was stirred for overnight at 80° C. under nitrogen atmosphere. The cooled reaction mixture was filtered, and the filtrate was concentrated under reduced pressure. The crude product was purified by chromatography: Column, C18; mobile phase A: H₂O, B: ACN; gradient 40% B to 60% B in 20 min; Detector: UV@210 nm. It gave methyl 6-((16-(13-(6-(methoxycarbonyl)pyridin-2-yl)-2,2-dimethyl-4-oxo-3,8,11-trioxa-5-azatridecan-13-yl)-1,4,10,13-tetraoxa-7,16-diazacyclooctadecan-7-yl)methyl)picolinate (450 mg) as a brown oil. MS (ES, m/z): 700 (M+Na), 678 (M+H).

[0695] Step 8: To a solution of methyl 6-((16-(13-(6-(methoxycarbonyl)pyridin-2-yl)-2,2-dimethyl-4-oxo-3,8,11-trioxa-5-azatridecan-13-yl)-1,4,10,13-tetraoxa-7,16-diazacyclooctadecan-7-yl)methyl)picolinate (450 mg, 579 mmol) in dichloromethane (2.5 mL) at 0° C. was added HCl/dioxane (2.5 ml, 4 M). The resulting solution was stirred for 20 min at room temperature. The reaction was quenched by the addition of saturated Na₂CO₃ (aq.). The aqueous layer was extracted with DCM: IPA (5:1) (30 mL×2). The combined organic layers were dried over anhydrous Na₂SO₄ and concentrated under reduced pressure to afford the crude product methyl 6-(2-(2-(2-aminoethoxy)ethoxy)-1-(16-((6-(methoxycarbonyl)pyridin-2-yl)methyl)-1,4,10,13-tetraoxa-7,16-diazacyclooctadecan-7-yl)ethyl)picolinate (330 mg). The crude product was used directly in the next step.

[0696] Step 9: A solution of methyl 6-(2-(2-(2-aminoethoxy)ethoxy)-1-(16-((6-(methoxycarbonyl)pyridin-2-yl)methyl)-1,4,10,13-tetraoxa-7,16-diazacyclooctadecan-7-yl)ethyl)picolinate (300 mg, 0.44 mmol) and 1-(2-oxopyridine-1-carbothioyl)pyridin-2-one (113.08 mg, 0.48 mmol) in dichloromethane (3 mL) was stirred for 1 h at room temperature under nitrogen atmosphere. The resulting mixture was concentrated under reduced pressure to afford the crude product methyl 6-(2-(2-(2-isothiocyanatoethoxy)ethoxy)-1-(16-((6-(methoxycarbonyl)pyridin-2-yl)methyl)-1,4,10,13-tetraoxa-7,16-diazacyclooctadecan-7-yl)ethyl)picolinate (380 mg). The crude product was used directly in the next step.

[0697] Step 10: A solution of methyl 6-(2-(2-(2-isothiocyanatoethoxy)ethoxy)-1-(16-((6-(methoxycarbonyl)pyridin-2-yl)methyl)-1,4,10,13-tetraoxa-7,16-diazacyclooctadecan-7-yl)ethyl)picolinate (380 mg, 0.52 mmol) and HCl (1.9 mL, 6 M) in dichloromethane (1.9 mL) was stirred for 3 h at 50° C. under nitrogen atmosphere. The resulting mixture was concentrated under reduced pressure and was basified to pH 6-7 with saturated NaHCO₃(aq.). The residue was purified by chromatography: Column, C18; mobile phase A: H₂O with 0.05% TFA, B: ACN, gradient 20% B to 36% B in 20 min; Detector: UV@210 nm. Then, the product fractions were concentrated under vacuum to remove MeCN. The solution was purified again by chromatography: Column, C18; mobile phase A: H₂O, B: ACN, gradient 95% B to 100% B in 20 min. The solution was concentrated to remove most MeCN and the aqueous solution was lyophilized to give 6-((16-(1-(6-carboxypyridin-2-yl)-2-(2-(2-isothiocyanatoethoxy)ethoxy)ethyl)-1,4,10,13-tetraoxa-7,16-diazacyclooctadecan-7-yl)methyl)picolinic acid (130 mg) as brown solid. ¹H NMR (300 MHZ, D20) 8.03-7.84 (m, 2H), 7.57 (dd, J=22.3, 7.4 Hz, 1H), 5.00 (s, OH), 4.59 (s, 1H), 4.20 (dd, J=23.4, 9.5 Hz, 1H), 3.82 (d, J=15.4 Hz, 4H), 3.70-3.58 (m, 6H), 3.58-3.49 (m, 6H). MS (ES, m/z): 692.3 (M+H).

### Example 15

### 6,6′-(((S)-2-(((5-(((((1R,8S,9r)-Bicyclo[6.1.0]non-4-yn-9-yl)methoxy)carbonyl)amino) pentyl)thio)methyl)-1,4,10,13-tetraoxa-7,16-diazacyclooctadecane-7,16-diyl)bis(methylene))dipicolinic acid

[chemical structure]

[chemical structure]

[chemical structure]

[0698] Step 1: A solution consisting of tert-butyl (5-mercaptopentyl)carbamate (0.30 g, 1.0 mmol) and DMF (3.0 mL) was added dropwise over 5 minutes to a 50 mL three-neck round-bottomed flask containing a suspension of sodium hydride (0.07 g, 60% in mineral oil, 2 mmol) in DMF (3.0 mL) at 0° C. and under a nitrogen atmosphere. Once addition was complete, the reaction mixture was brought to room temperature and stirring continued for 15 minutes. The reaction mixture was then re-cooled to 0° C. and treated dropwise over 10 minutes with a solution consisting of dimethyl 6,6′-((2-(((methylsulfonyl)oxy)methyl)-1,4,10,13-tetraoxa-7,16-diazacyclooctadecane-7,16-diyl)bis(methylene))(S)-dipicolinate (0.6 g, 0.9 mmol) and DMF (3.0 mL). Once addition was complete, the reaction mixture was slowly warmed to room temperature and stirring continued for 1.5 h. The reaction mixture was then carefully treated with sat. aqueous NH₄Cl (1.0 mL) and concentrated to dryness to give an oil. The oil was subjected to preparative HPLC (Column: XBRIDGE C18 19×150 mm, 5.0 μm; Mobile phase: 0.1% TFA in water/acetonitrile; Flow Rate: 15.0 mL/min) to yield dimethyl 6,6′-((2-(((5-((tert-butoxycarbonyl)amino) pentyl)thio)methyl)-1,4,10,13-tetraoxa-7,16-diazacyclooctadecane-7,16-diyl)bis(methylene))(S)-dipicolinate (0.25 g).

[0699] Step 2: A stir bar, dimethyl 6,6′-((2-(((5-((tert-butoxycarbonyl)amino) pentyl)thio)methyl)-1,4,10,13-tetraoxa-7,16-diazacyclooctadecane-7,16-diyl)bis(methylene))(S)-dipicolinate (0.25 g, 0.32 mmol), MeOH (1.0 mL), and HCl in methanol (4 M, 1.5 mL, 6.3 mmol) were added to a 25 mL round-bottomed flask at 0° C., which was subsequently brought to room temperature and the mixture stirred for 3 h. The volatiles were then removed in vacuo to yield dimethyl 6,6′-((2-(((5-aminopentyl)thio)methyl)-1,4,10,13-tetraoxa-7,16-diazacyclooctadecane-7,16-diyl)bis(methylene))(S)-dipicolinate (0.21 g), which was used without purification.

[0700] Step 3: A stir bar, dimethyl 6,6′-((2-(((5-aminopentyl)thio)methyl)-1,4,10,13-tetraoxa-7,16-diazacyclooctadecane-7,16-diyl)bis(methylene))(S)-dipicolinate (0.15 g, 0.22 mmol), ((1R,8S,9r)-bicyclo[6.1.0]non-4-yn-9-yl)methyl 4-nitrophenyl carbonate (68 mg, 0.22 mmol), triethylamine (66 mg, 0.65 mmol), and a mixture of DCM (2 mL) and DMF (0.1 mL) were added to a 25 mL three-neck round-bottomed flask at 0° C. under a nitrogen atmosphere. The resultant mixture was gradually warmed to room temperature and stirred overnight. The mixture was then concentrated to dryness to give dimethyl 6,6′-(((S)-2-(((5-(((((1R,85,9r)-bicyclo[6.1.0]non-4-yn-9-yl)methoxy)carbonyl)amino) pentyl)thio)methyl)-1,4,10,13-tetraoxa-7,16-diazacyclooctadecane-7,16-diyl)bis(methylene))dipicolinate (0.1 g), which was used without purification.

[0701] Step 4: A stir bar, dimethyl 6,6′-(((S)-2-(((5-(((((1R,85,9r)-bicyclo[6.1.0]non-4-yn-9-yl)methoxy)carbonyl)amino) pentyl)thio)methyl)-1,4,10,13-tetraoxa-7,16-diazacyclooctadecane-7,16-diyl)bis(methylene))dipicolinate (0.10 g, 0.12 mmol), aqueous LiOH (3.5 mL, 0.1 N, 0.35 mmol), and MeOH (0.5 mL) were added to a 8 mL reaction vial and the resultant mixture stirred overnight at room temperature. The reaction mixture was then treated with acetic acid until pH˜6.5, and subsequently concentrated to dryness in vacuo at room temperature to yield an oil, which was purified via preparative HPLC (Column: XBRIDGE C18 19×150 mm, 5.0 μm; Mobile phase: 0.1% Formic acid in H₂O/ACN; Flow Rate: 15.0 mL/min) to yield 6,6′-(((S)-2-(((5-(((((1R,8S,9r)-bicyclo[6.1.0]non-4-yn-9-yl)methoxy)carbonyl)amino) pentyl)thio)methyl)-1,4,10,13-tetraoxa-7,16-diazacyclooctadecane-7,16-diyl)bis(methylene))dipicolinic acid (42 mg).

### Example 16

### N-acyl-DBCO tagged 6,6′-((2-(((5-Aminopentyl)thio)methyl)-1,4,10,13-tetraoxa-7,16-diazacyclooctadecane-7,16-diyl)bis(methylene))(S)-dipicolinic acid

[chemical structure]

[chemical structure]

[chemical structure]

[0702] Step 1: A stir bar, dimethyl 6,6′-((2-(((5-((tert-butoxycarbonyl)amino) pentyl)thio)methyl)-1,4,10,13-tetraoxa-7,16-diazacyclooctadecane-7,16-diyl)bis(methylene))(S)-dipicolinate (0.12 g, 0.15 mmol), MeOH (0.5 mL), and HCl in methanol (4 M, 0.75 mL, 3.0 mmol) were added to a 25 mL round-bottomed flask at 0° C. and then brought to room temperature and stirred for 2 h. The volatiles were removed in vacuo to yield dimethyl 6,6′-((2-(((5-aminopentyl)thio)methyl)-1,4,10,13-tetraoxa-7,16-diazacyclooctadecane-7,16-diyl)bis(methylene))(S)-dipicolinate (70 mg), which was used without purification.

[0703] Step 2: A stir bar, dimethyl 6,6′-((2-(((5-aminopentyl)thio)methyl)-1,4,10,13-tetraoxa-7,16-diazacyclooctadecane-7,16-diyl)bis(methylene))(S)-dipicolinate (50 mg, 0.070 mmol),11,12-Didehydro-γ-oxodibenz [b,f]azocine-5 (6H)-butanoic acid (20 mg, 0.070 mmol), triethylamine (21 mg, 0.21 mmol), HATU (38 mg, 0.10 mmol), and DCM (0.5 mL) were added to a 25 mL three-neck round-bottomed flask at 0° C. under a nitrogen atmosphere, and subsequently brought to room temperature and stirred overnight. The reaction mixture was treated with water (10 mL) and extracted with dichloromethane (10 mL×3), and the combined extracts washed with 10% aqueous NaHCO₃ (10 mL) and brine (10 mL), dried over anhydrous Na₂SO₄, filtered, and concentrated to dryness to yield an oil. The oil was purified via silica gel chromatography (0-10% MeOH/DCM) to yield N-acyl-DBCO tagged dimethyl 6,6′-((2-(((5-aminopentyl)thio)methyl)-1,4,10,13-tetraoxa-7,16-diazacyclooctadecane-7,16-diyl)bis(methylene))(S)-dipicolinate (16 mg).

[0704] Step 3: A stir bar, N-acyl-DBCO tagged dimethyl 6,6′-((2-(((5-aminopentyl)thio)methyl)-1,4,10,13-tetraoxa-7,16-diazacyclooctadecane-7,16-diyl)bis(methylene))(S)-dipicolinate (16 mg, 0.016 mmol), aqueous LiOH (0.49 mL, 0.1 N, 0.049 mmol), and MeOH (0.25 mL) were added to an 8 mL reaction vial and the mixture stirred at room temperature overnight. The reaction mixture was then treated with acetic acid until pH˜6.5, and concentrated to dryness in vacuo at room temperature to yield a concentrate, which was purified via preparative HPLC (Column: XBRIDGE C18 19×150 mm 5.0 μm; Mobile phase: 10 mM Ammonium Acetate in water/ACN; Flow Rate: 15.0 mL/min) to yield N-acyl-DBCO tagged 6,6′-((2-(((5-aminopentyl)thio)methyl)-1,4,10,13-tetraoxa-7,16-diazacyclooctadecane-7,16-diyl)bis(methylene))(S)-dipicolinic acid (5 mg) as an off-white solid. LC-MS APCI: Calculated for C₅₁H₆₂N₆O₁₀S; 950.42; Observed m/z [M+H]⁺951.4. ¹H NMR (400 MHZ, D₂O): δ 7.81-7.75 (m, 4H), 7.52-7.17 (m, 10H), 4.97-4.90 (m, 1H), 4.80 (s, 4H), 4.14 (s, 3H), 3.77-3.46 (m, 16H), 3.10 (s, 7H), 2.83-2.80 (m, 2H), 2.55-2.53 (m, 2H), 2.42-2.38 (m, 3H), 2.11-2.08 (m, 3H), 1.39-1.35 (m, 2H), 1.20-1.10 (m, 4H).

### Example 17

### N-acyl-DBCO tagged 6-((4-((6-Aminoethyl)carbamoyl)phenyl) 16-((6-carboxypyridin-2-yl)-1,4,10,13-tetraoxa-7,16-diazacyclooctadecan-7-yl)methyl)picolinic acid (TOPA-[C₇]-benzimido-DBCO)

[chemical structure]

[chemical structure]

[chemical structure]

[0705] Step 1: To a mixture of methyl 6-formylpicolinate (4.00 g, 24.2 mmol), (4-(tert-butoxycarbonyl)phenyl) boronic acid (10.7 g, 48.5 mmol), PdCl₂ (0.21 g, 1.2 mmol), tri (naphthalen-1-yl)phosphine (0.50 g, 1.2 mmol) and potassium carbonate (10.0 g, 72.7 mmol) under nitrogen at −78° C. in a 500 mL three neck round bottom flask was added tetrahydrofuran (100 mL) in one portion. The mixture was purged with nitrogen and stirred at r.t. for 30 min, then heated at 65° C. for 24 h. The reaction mixture was cooled r.t. and filtered through a pad of Celite® and the filtrate was concentrated to dryness. The crude product was subjected to silica gel chromatography (0-50% EtOAc/petether) to afford methyl 6-((4-(tert-butoxycarbonyl)phenyl)(hydroxy)methyl)picolinate as a yellow oil (2.5 g, 30%).

[0706] Step 2: A stir bar, methyl 6-((4-(tert-butoxycarbonyl)phenyl)(hydroxy)methyl)picolinate (2.50 g, 7.30 mmol), PPh₃ (3.43 g, 13.1 mmol), N-bromosuccinimide (2.13 g, 12.0 mmol) and DCM (30 mL) were taken in a 250 mL three neck round bottom flask under nitrogen atmosphere at r.t. and stirred for 1 h. The reaction solution was loaded onto a silica gel column and purified using 0-30% ethyl acetate in petroleum ether to get compound methyl 6-(bromo (4-(tert-butoxycarbonyl)phenyl)methyl)picolinate (1.65 g, 56%) as a yellow oil.

[0707] Step 3: A stir bar, methyl 6-((1,4,10,13-tetraoxa-7,16-diazacyclooctadecan-7-yl)methyl)picolinate (1.52 g, 3.69 mmol), 6-(bromo (4-(tert-butoxycarbonyl)phenyl)methyl)picolinate (1.50 g, 3.69 mmol), Na₂CO₃ (1.17 g, 11.1 mmol), and acetonitrile (30 mL) were added to a 250 mL three neck round-bottomed flask, and the resultant heterogeneous mixture was heated at 90° C. for 16 h under nitrogen atmosphere. Subsequently reaction mass was cooled to r.t., filtered through a pad of Celite®, and concentrated to dryness in vacuo to give the crude product. The crude product was subjected to silica gel chromatography (0-10% MeOH/DCM) to afford methyl 6-((4-(tert-butoxycarbonyl)phenyl)(16-((6-(methoxycarbonyl)pyridin-2-yl)methyl)-1,4,10,13-tetraoxa-7,16-diazacyclooctadecan-7-yl)methyl)picolinate as a brown oil (1.2 g, 44%).

[0708] Step 4: A stir bar, methyl 6-((4-(tert-butoxycarbonyl)phenyl)(16-((6-(methoxycarbonyl)pyridin-2-yl)methyl)-1,4,10,13-tetraoxa-7,16-diazacyclooctadecan-7-yl)methyl)picolinate (1.2 g, 1.6 mmol), TFA (0.62 mL, 8.1 mmol) and DCM (20 mL) were added to a 100 mL three neck round bottom flask at r.t. and stirred for 1 h. Reaction mixture was concentrated to dryness and the resultant crude product was subjected to preparative HPLC (Column: XBRIDGE C18 (19×150 mm) 5.0 μm; Mobile phase: 0.1% TFA in water/ACN; Flow Rate: 15.0 mL/min) to give 4-((6-(methoxycarbonyl)pyridin-2-yl)(16-((6-(methoxycarbonyl)pyridin-2-yl)methyl)-1,4,10,13-tetraoxa-7,16-diazacyclooctadecan-7-yl)methyl)benzoic acid (0.8 g, 72%) as brown oil. LC-MS APCI: Calculated for C₃₅H₄₄N₄O₁₀ 680.31; Observed m/z [M+H]⁺681.5. Purity by LC-MS: 99.87%. Purity by HPLC: 97.14% (97.01% at 210 nm, 97.20% at 254 nm and 97.21% at 280 nm; Column: Atlantis dC18 (250×4.6 mm), 5 μm; Mobile phase A: 0.1% TFA in water, Mobile phase B: acetonitrile; Flow rate: 1.0 mL/min. %. ¹H NMR (400 MHZ, DMSO-d6): δ 8.12-8.07 (m, 4H), 8.00-7.98 (m, 2H), 7.75-7.73 (m, 4H), 6.10 (s, 1H), 4.67 (s, 2H), 3.96 (s, 3H), 3.91 (s, 3H), 3.82 (s, 8H), 3.56 (s, 8H), 3.52 (s, 8H).

[0709] Step 5: A stir bar, 4-((6-(methoxycarbonyl)pyridin-2-yl)(16-((6-(methoxycarbonyl)pyridin-2-yl)methyl)-1,4,10,13-tetraoxa-7,16-diazacyclooctadecan-7-yl)methyl)benzoic acid (0.25 g, 0.37 mmol), DBCO (0.10 g, 0.37 mmol), triethylamine (0.16 mL, 1.1 mmol), HBTU (0.21 g, 0.55 mmol) and DCM (10 mL) were added to a 25 mL three neck round-bottom flask at 0° C. under nitrogen atmosphere at r.t. and stirred for 16 h. The reaction was quenched with water (20 mL) and it was extracted with DCM (3×20 mL). The combined extracts were washed with 10% aqueous NaHCO₃ solution (20 mL), brine (20 mL), dried over anhydrous Na₂SO₄, filtered, and concentrated to dryness to afford the crude product as an oil. The crude product was subjected to silica gel chromatography (0-10% MeOH/DCM) to give TOPA dimethyl ester-[C₇]-phenyl-DBCO (0.12 g, 35%) as a colorless gummy oil.

[0710] Step 6: A stir bar, TOPA dimethyl ester-[C₇]-phenyl-DBCO (0.1 g, 0.1 mmol), aqueous LiOH·H₂O (3 mL, 0.1 N, 0.3 mmol) and THF/MeOH/H₂O (4:1:1 v/v/v, 2 mL) were added to a 8 mL reaction vial at r.t. and it was allowed to stir for 2 h. The reaction mixture was neutralized with aqueous HCl (IN) to PH˜6.5. The reaction mixture was concentrated to dryness in vacuo at room temperature, and the resultant crude product was subjected to preparative HPLC (Column: XBRIDGE C18 (19×150 mm) 5.0 μm; Mobile phase: 10 Mm Ammonium Acetate in water/ACN; Flow Rate: 15.0 mL/min) to give TOPA-[C₇]-phenyl-DBCO (20 mg, 21%) as an off-white solid. LC-MS APCI: Calculated for C₅₁H₅₄N₆O₁₀ 910.39; Observed m/z [M−H]⁺909.3. Purity by LC-MS: 92.47%. Purity by HPLC: 90.68% (88.04% at 210 nm, 90.43% at 254 nm and 93.56% at 280 nm; Column: XBRIDGE C₈ (50×4.6 mm), 3.5 μm; Mobile phase A: 10 mM Ammonium bicarbonate in water, Mobile phase B: acetonitrile; Flow rate: 1.0 mL/min.

[0711] ¹H NMR (400 MHZ, DMSO-d6): δ 7.84-7.82 (m, 4H), 7.60-7.29 (m, 12H), 7.13-7.10 (m, 2H), 5.12-5.02 (m, 2H), 3.97 (s, 2H), 3.59-3.44 (m, 20H), 2.85 (s, 4H), 2.73-2.68 (m, 6H).

### Example 18

### TOPA-[C₇]-benzyimido-DBCO-triazole-PSMB-127 Antibody Conjugate

[chemical structure]

[0712] Step 1. Azide modification of mAb and Click reaction: PSMB127 was site-selectively modified with 100× molar excess of 3-azido propylamine and microbial transglutaminase (MTG; Activa TI) at 37° C. The addition of two azides on the heavy chains of the mAb was monitored by intact mass ESI-TOF LC-MS on an Agilent G224 instrument. Excess 3-azido propylamine and MTG was removed and azide modified mAb (azido-mAb) was purified using a 1 mL GE Healthcare MabSelect column. Azido-mAb is eluted from the resin using 100 mM sodium citrate pH 3.0 and subsequently exchanged into 20 mM Hepes, 100 mM NaCl pH 7.5 using 7K Zeba® desalting columns. 10× molar excess of TOPA-[C₇]-phenyl-DBCO was reacted with site specific azide-PSMB 127 (DOL=2) at 37° C. for 1 hour without shaking. Completion of the DBCO-azide click reaction was monitored by intact mass spectrometry. Excess free chelator was removed by desalting the conjugate over a Zeba®7K desalting column into 20 mM Hepes, 100 mM NaCl pH 7.5 followed by three sequential 15× dilution and concentration steps in 20 mM Hepes, 100 mM NaCl pH 7.5 using a 30K MWCO Amicon concentrator device by spinning at 3800 ×g. This provided the final site specific TOPA-[C₇]-phenyl-DBCO-PSMB127 conjugate with CAR=2. The final conjugate was confirmed to be monomeric by analytical size exclusion chromatography on a Tosoh TSKgel G3000SWx1 7.8 mm×30 cm, 5 u column; column temperature: room temperature; the column was eluted with DPBS buffer (1×, without calcium and magnesium); flow rate: 0.7 mL/min; 18 min run; injection volume: 18 μL.

[0713] Step 2. Chelation: Stock solutions of the following metal salts were prepared in pure water:

| Salt | Catalog # | Concentration |
|---|---|---|
| Cerium (III) Chloride | Sigma Cat # 429406 | 10 mM |
| Neodymium (III) chloride | Sigma Cat # 289183 | 10 mM |
| hexahydrate | | |
| Terbium (III) chloride | Sigma Cat # 451304 | 10 mM |
| Lutetium (III) chloride | Sigma Cat # 450960 | 10 mM |
| Thulium (III) chloride | Sigma Cat # 451304 | 10 mM |
| Yttrium (III) chloride | Sigma Cat # 451363 | 10 mM |
| Holmium (III) chloride | Sigma Cat # 450901 | 10 mM |

[0714] Metal solutions were added to the TOPA-[C₇]-phenyl-DBCO-PSMB127 in 5× molar excess (6.8 μM antibody, 34 μM metal ion) in 10 mM sodium acetate buffer pH 5.2 and incubated for 2 hours at 37C. Excess metal was removed by desalting with a Zeba® column (ThermoFisher®) followed by two cycles of 10× dilution and concentration in a 50K MWCO Amicon concentrator (EMD Millipore®). Chelation was assessed by intact and reduced mass LC-MS.

[0715] Step 3. Stability Determination: To determine stability of the chelate, DTPA challenge was performed. 50 μL of the sample (6.3 μM antibody) was combined with 50 μL of 10 mM DTPA pH 6.5 and incubated at 37C overnight. Chelation was assessed by intact and reduced mass LC-MS. LC-MS was performed on an Agilent 1260 HPLC system connected to an Agilent G6224 MS-TOF Mass Spectrometer. LC was run on an Agilent RP-mAb C₄ column (2.1×50 mm, 3.5 micron) at a flow rate of 1 mL/min with the mobile phase 0.1% formic acid in water (A) and 0.1% formic acid in acetonitrile (Sigma-Aldrich Cat #34688) (B) and a gradient of 20% B (0-2 min), 20-60% B (2-3 min), 60-80% B (3-5.5 min). The instrument was operated in positive electro-spray ionization mode and scanned from m/z 600 to 6000. Mass to charge spectrum was deconvoluted using the Maximum Entropy algorithm, and relative amounts of the relevant species were estimates by peak heights of the deconvoluted masses. Instrument settings included: capillary voltage 3500V; fragmentor 175V; skimmer 65V; gas temperature 325C; drying gas flow 5.0 L/min; nebulizer pressure 30 psig; acquisition mode range 100-7000 with 0.42 scan rate.

[0716] Changes in MW relative to the TOPA-[C₇]-phenyl-DBCO-PSMB127 were observed for the cerium and neodymium samples. The intact mass of the conjugate incubated with cerium showed an increase in MW of 139 (20% by peak area) or 276 (77%) Da corresponding to the addition of 1 or 2 cerium ions. After DTPA challenge, the masses remained similar with similar abundance (30 and 67% for the +138 and +274 species).

### Example 19

### 6-((16-((6-carboxypyridin-2-yl)(4-isothiocyanatophenyl)methyl)-1,4,10,13-tetraoxa-7,16-diazacyclooctadecan-7-yl)methyl)picolinic acid (H₂bp18c6-benzyl-phenyl)(TOPA-[C₇]-phenylisothiocyanate and Sodium salt forms

[chemical structure]

[0717] Compound 2 was prepared in an analogous manner to existing literature methods see. J. Org. Chem; 1987, 52, 5172.

[chemical structure]

Compound 3 was prepared in an analogous manner to existing literature methods see. Chemistry
[0718] a European Journal; 2015, 21, 10179.

[chemical structure]

### Preparation of Compound 4

[chemical structure]

[0719] 1,4,10,13-tetraoxa-7,16-diazacyclooctadecane (494g, 1.88mol, 2.5 equiv.), NaCl (44.1 g, 0.75 mol, 1.0 equiv.), H₂O (140 mL, 1 volume with respect to compound 3) and acetonitrile (2.1L, 15 volumes) were charged to a 10 L reactor under N₂ atmosphere at 15-20° C., the heated to 65° C. To the resulting mixture was added a solution of compound 3 (140 g, 0.75 mol) in acetonitrile (280 ml, 2 volumes) dropwise over 1 hour 65° C. The solution was aged at 65° C. for 0.5 hours. LCMS analysis of the mixture showed the reaction was completed. The mixture was cooled to room temperature and concentrated under vacuum. Acetone (700 ml, 5 volumes) was added to the mixture and the suspension was stirred for an additional 1 hour. The mixture was filtered (the filtered solid was unreacted compound 2). The filtrate was concentrated under vacuum, then dissolved in DCM (1.4L, 10 volumes). The organic phase was washed with water (3×750 mL) and the organic phase was dried over Na₂SO₄ then concentrated under vacuum to yield compound 4, 212g (63% yield, assay: 85% w/w). LCMS: (ES,m/z): 412.15 [M+H]⁺¹H-NMR (300 MHz, DMSO-d6, ppm): 8 7.98-7.87 (m, 2H), 7.81 (dd, J=6.4, 2.6 Hz, 1H), 3.87 (s, 3H), 3.81 (s, 2H), 3.61-3.38 (m, 16H), 2.77 (dt, J=19.0, 5.2 Hz, 8H).

### Preparation of Compound 7

[chemical structure]

[0720] Methyl 6-formylpicolinate 5 (250 g, 1.0 equiv.), (4-((tert-butoxycarbonyl)amino)phenyl) boronic acid 6 (538 g, 1.5 equiv.) and degassed THF (6.5 L, 26 volumes with respect to 5) were charged into a 10 L reactor under N₂ atmosphere at 15-20° C. This was followed by the addition of PdCl₂ (14.0 g, 0.05 equiv.), tri (naphthalen-1-yl)-phosphane (31 g, 0.05 equiv.) and K₂CO₃ (650 g, 3.1 equiv.). The resulting solution was stirred at 20° C. for 0.5 hours. The Mixture was then heated to 65° C. and aged for 17 hours. Analysis by LCMS showed this reaction was complete. The resulting solution was cooled at room temperature and was diluted with ice water (2.5L, 10 volumes) and ethyl acetate (5L, 20 volumes). The mixture was stirred then filtered through a celite pad. The solution was allowed to separate, and the aqueous lower layer was discarded. The organic phase was washed with the water (2×1.5L, 12 volumes). The layers were separated, and the organic layer was dried over Na₂SO₄ and concentrated under vacuum. The resulting residue was treated with heptane (1.25L, 5 Volumes) and the resulting suspension was stirred for 0.5 hours. The mixture was filtered, and the filter cake was washed with n-heptane (500 ml, 2 volumes) to yield 530 g (98% yield, LCAP purity: 90%) of desired product 7 as yellow solid, which was used directly in the next step without further purification. LCMS: (ES,m/z): 381.10 [M+Na]⁺¹H-NMR (300 MHz, DMSO-d6, ppm): 8 9.27 (s, 1H), 8.03-7.85 (m, 2H), 7.79 (dd, J=7.7, 1.4 Hz, 1H), 7.39 (d, J=8.4 Hz, 2H), 7.26 (d, J=8.4 Hz, 2H), 6.13 (d, J=4.0 Hz, 1H), 5.72 (d, J=3.9 Hz, 1H), 3.87 (s, 3H), 1.46 (s, 9H).

### Preparation of Compound 8

[chemical structure]

[0721] Methyl 6-((4-((tert-butoxycarbonyl)amino)phenyl)(hydroxy)methyl)picolinate 7 (310 g, 1.0 equiv.), triethylamine (219 g, 2.5 equiv.) and DCM (6.2L, 20 volumes with respect to 7) were charged into a 10L reactor under nitrogen atmosphere at 15-20° C. and the solution was cooled to 0° C. Methanesulfonyl chloride (99.2 g, 1.0 equiv.) was added dropwise over 30 min maintaining 5 the temperature at 0° C. The cooling bath was removed, and the temperature was allowed to reach ambient temperature and was then aged for 1 hour at this temperature. The solution was concentrated under vacuum at 10-15° C. and the residue was then dissolved in acetonitrile (438 ml, 2 volumes). The resulting solution was concentrated under vacuum to yield 518g (crude) of desired product 8. This crude product was used for the next step directly without further purification.

[chemical structure]

### Preparation of Compound 9

[0722] Methyl 6-((4-((tert-butoxycarbonyl)amino)phenyl)-((methylsulfonyl)oxy)methyl)picolinate 8 (212 g, 1.0 equiv. 85% purity by Q-NMR), Na₂CO₃ (137.6 g, 3.0 equiv.) and acetonitrile (3.56 L, 20 volumes with respect to 8) were charged into a 10L reactor under a nitrogen atmosphere at room temperature then the mixture was heated to 65° C. and aged for 1 hour. A solution of methyl 6-((1,4,10,13-tetraoxa-7,16-diazacyclooctadecan-7-yl)methyl)picolinate 4 (377.8 g, 2.0 equiv.) in acetonitrile (3L, 10 volumes) was added dropwise over 0.5 hours at 65° C. The mixture was aged at this temperature until HPLC analysis showed this reaction was completed. The resulting solution was cooled at room temperature then filtered, and the filter cake was washed by MeOH 25 (2×1 volume). The filtrate was concentrated under vacuum and the resulting residue was dissolved in EA (700 mL), then silica gel (800g, type: ZCX-2, 100-200 mesh, 2.11 w/w) was added. The mixture was concentrated under vacuum whilst maintaining the temperature below 35° C. Silica gel (9.6 kg, type: ZCX-2, 100-200 mesh, 26.3 w/w) was charged to the column, followed by the prepared dry silica gel containing adsorbed crude 9. The column was eluted with ethyl acetate:petroleum ether: dichloromethane (3:3:1)/methanol:dichloromethane (1:1) (gradient from 100:0 to 90:10 with sample collection every 4L+0.5 L). The fractions were analyzed by TLC (ethyl acetate:petroleum ether: dichloromethane:methanol=4:4:1:1). The product bearing fractions were combined and concentrated to yield 260g of compound 9 as yellow solid (HPLC: 94%, QNMR: 92%). An additional 70g of compound 9 was afforded as yellow oil (HPLC: 75%, QNMR: 60%). LCMS (ES, m/z): 752.30 [M+H]⁺ Observed m/z 1H-NMR (400 MHZ, CDCl₃, ppm): δ 7.53-7.32 (m, 3H), 7.28-7.18 (m, 3H), 6.86 (d, J=8.4 Hz, 2H), 6.76 (d, J=8.4 Hz, 2H), 6.09 (s, 1H), 4.63 (s, 1H), 3.48 (s, 3H), 3.44 (bs, 5H), 3.17-2.92 (m, 16H), 2.38 (dq, J=25.0, 7.2, 6.8 Hz, 8H), 0.97 (s, 9H).

### Preparation of Compound 10

[chemical structure]

[0723] Compound 9 (260g, QNMR: 92%, 1.0 equiv.), N,O-bis(trimethylsilyl) acetamide (BSA, 6.0 equiv.) and acetonitrile (4L, 15 volumes) were charged into a 10L reactor under nitrogen atmosphere at 15-20° C. The mixture was stirred for 40 min at 20° C. A solution of TMSOTf (212.9 g, 3.0 equiv.) in acetonitrile (1.3L, 5 volumes) was charged dropwise over 0.5 hours maintain the internal temperature between 15-20° C. The solution was aged for 1 hour at 15-20° C. When process analysis (sample preparation 0.1 mL system+0.9 mL ACN+one drop of diisopropylethylamine) showed complete conversion of staring material the mixture was quenched with diisoproylethylamine (617 g, 15.0 equiv.) maintain a temperature between 5-10° C. The mixture was stirred for 20 minutes at 5-10° C., then a saturated aqueous NH₄Cl solution (2.6L, 10 volumes) was charged maintaining a temperature between 5-10° C. The mixture was aged for an additional 30 minutes at this temperature. The aqueous phase (contained solids) was collected and was extracted with 2-MeTHF (520 ml, 2 volumes). The organic phases were combined and checked for water content by KF (KF: 9.18%), then dried with anhydrous Na₂SO₄ (500 g, 10.0 equiv.). The solids were removed by filtration and the filter cake was washed by acetonitrile (2×520 ml, 2 volumes). The filtrates were then dried with anhydrous Na₂SO₄ (500 g, 10.0 equiv.). After filtration, the filter cake was washed by acetonotrile (2×520 ml, 2 volumes) and water content was checked by KF (KF: 8.15%). The acetonitrile/2-MeTHE stream of 10 was used for next step directly. (The product was not stable to LCMS conditions).

### Preparation of Compound 14 (Free Acid)

[chemical structure]

[0724] Methyl 6-((4-((tert-butoxycarbonyl)amino)phenyl)(16-((6-(methoxycarbonyl)pyridin-2-yl)methyl)-1,4,10,13-tetraoxa-7,16-diazacyclooctadecan-7-yl)methyl)picolinate (6.0 g, 1.0 equiv.) and BSA (9.7 g, 6.0 equiv.) and MeCN (120 mL, 20 volumes with respect to 9) were charged to a 500 mL reactor under nitrogen atmosphere at room temperature. A solution of TMSOTf (5.4 g, 2.3 equiv.) in MeCN (120 mL, 20 volumes) was added dropwise over 30 min at room temperature. The mixture was aged for overnight at room temperature. Analysis of the mixture (sample preparation 0.1 mL system+0.9 mL ACN+one drop of diisopropylethylamine) showed the reaction had reached completion. The mixture was quenched with diisoproylethylamine (15.4 g, 15.0 equiv.) maintain a temperature between 0-5° C. The mixture was stirred for 5 minutes at 0-5° C., then a saturated aqueous NH₄Cl solution (60 mL, 10 volumes) was charged dropwise maintaining a temperature between 0-5° C. The aqueous phase was removed by extraction and the organic phase was collected and used for next step directly. The organic phase was charged to 500 mL 3-necked round bottle bottom bottle, a solution of LiOH (1.15 g, 6.0 equiv.) in water (60 mL, 10 V) was added to the solution at room temperature. The solution was stirred for 1 hour at this temperature. Analysis of the mixture (sample preparation, 0.1 mL system+0.9 mL acetonitrile) showed not fully conversion. Another portion of LiOH (576 mg, 3.0 equiv.) was added and the solution was stirred for another 1 hour at room temperature. Analysis of the mixture (sample preparation, 0.1 mL system+0.9 mL acetonitrile) showed the reaction had reached completion. Then, TCDI (5.6 g, 3.9 equiv.) was added and the solution was stirred for 1 hour at room temperature. Analysis of the mixture (sample preparation, 0.1 mL system+0.9 mL acetonitrile) showed not fully conversion. Another portion of TCDI (2.8 g, 2.0 equiv.) was added and the solution was stirred for another 1 hour at room temperature.

[0725] Analysis of the mixture (sample preparation, 0.1 mL system+0.9 mL acetonitrile) showed the reaction had reached completion. The reaction solution was separated by reversal phase Combi-Flash. Method: column C18, A solution H₂O (Containing 0.01% formic acid), B solution ACN. 5% to 35% in 40 min, flow (100 mL/min), product in 20 min-25 min. Collect a solution. The solution was concentrated to remove ACN and separated by reversal phase Combi-Flash again. Method: column C18, A solution H₂O, B solution ACN. 5% 10 min,5% to 35% in 5 min 95% 10 min, flow (100 mL/min), product in 13 min-25 min. Collect a solution. The solution was concentrated under vacuum at <20° C. and dried by lyophilization. This result in 2.5g (47% yield in 3 ^{st} eps) compound 14 as a yellow solid. Compound 14 (6-((16-((6-carboxypyridin-2-yl)(4-isothiocyanatophenyl)methyl)-1,4,10,13-tetraoxa-7,16-diazacyclooctadecan-7-yl)methyl)picolinic acid) required storage at −80° C. LCMS: (ES, m/z): 666.3 [M+H]⁺¹H-NMR: (400 MHZ, D₂O, ppm): 7.94-7.84 (m, 4H), 7.56-7.40 (m, 4H), 7.16-7.14 (m, 2H), 5.83 (s, 1H), 4.56 (s, 2H), 3.80-3.75 (m, 8H), 3.60-3.49 (m, 14H), 3.36-3.33 (m, 2H).

### Preparation of Compound 11 (Sodium Salt)

[chemical structure]

[0726] The prepared solution of compound 10 in ACN and 2-MeTHF was charged to a 10L 4-necked reaction and the solution was cooled to 5-10° C. Powdered NaOH (56.9 g, 4.5 equiv.) was added maintaining the temperature between 5-10° C. The solution was stirred for 0.5 hours at 15-20° C. Analysis of the mixture (sample preparation, 0.1 mL system+0.9 mL acetonitrile) showed no conversion. Additional powdered NaOH (25.3 g, 2.0 equiv.) was added at 5-10° C. The solution was aged for an additional 0.5 hours at 15-20° C. A second IPC was analyzed and showed there was 50% conversion. A final charge of powdered NaOH (25.3 g, 2.0 equiv.) was added at 5-10° C. The mixture was stirred for additional 0.5 hours at 15-20° C. Analysis showed complete conversion of the starting material 10. The mixture was filtered, and the filter cake was washed by acetonitrile (2×520 ml, 2 volumes). The final solution (˜7.5 L, 28.8 volumes) was concentrated to 1-2 volumes maintaining a temperature between 15-20° C. The residue was then treated with acetonitrile (2L, 7.7 volumes) and the water content was checked by KF (KF: 5.7%). The mixture was filtered, and the filter cake was washed by ACN (2×520 ml, 2 volumes). The solution was then concentrated to 1-2 V under vacuum at 15-20° C. The water content was again checked by KF (KF: 5.5%). The solution was diluted with acetonitrile (390 ml, 1.5 volumes), and was added dropwise over 0.5 hours into MTBE (2.6L, 10 volumes) maintaining a temperature between 15-20° C. The solvents were decanted to leave a viscous oil which was redissolved in acetonitrile (520 ml, 2 volumes) and added into MTBE (2.6L, 10 volumes). This process was repeated a further four times. To yield a viscous oil which was finally dissolved in acetonitrile (520 ml, 2 volumes) and dried, then concentrated at 15-20° C. under reduced pressure. Residual solvents were then removed by evaporation with an oil pump at 15-20° C. After drying 335 g of compound 11 was afforded as an off-yellow solid (QNMR: 70%, 87% overall yield over the two steps). LCMS (ES,m/z): 624.3 [M-TfONa-2Na+3H]⁺¹H-NMR (300 MHz, Methanol-d4, ppm): δ 7.97 (dd, J=7.8, 2.1 Hz, 2H), 7.84 (t, J=7.7 Hz, 1H), 7.75 (t, J=7.8 Hz, 1H), 7.36 (dd, J=7.8, 1.1 Hz, 1H), 7.23 (d, J=7.7 Hz, 1H), 7.11 (d, J=8.5 Hz, 2H), 6.72 (d, J=8.5 Hz, 2H), 3.96 (s, 1H), 3.83-3.36 (m, 18H), 3.03-2.62 (m, 6H), 2.55 (d, J=14.3 Hz, 2H).

### Preparation of Compound 12 (TOPA-[C₇]-phenylisothiocyanate sodium salt)

[chemical structure]

[0727] TCDI (68.7 g, 1.4 equiv.) and acetonitrile (2.6L, 8 volumes) were charged to a 10L reactor under nitrogen atmosphere at 15-20° C. A solution of compound 11 (330 g, Na+salt, QNMR: 70%, 1.0 equiv.) in acetonitrile (660 mL, 2 volumes) was added dropwise over 30 min maintaining a temperature between 15-20° C. The mixture was aged for 0.5 hours at 15-20° C. Analysis of the mixture (sample preparation: 30 μL system+300 μL ACN+a drop of water) showed the reaction had reached completion. The water content was checked by KF (KF: 0.19%). The system was dried and concentrated at 15-20° C. under reduced pressure. The resulting residue was dissolved in acetonitrile (945 ml, 2.9 volumes) and the water content was measured by KF (KF: 0.34%). isopropyl acetate (660 ml, 2 volumes) was charged to the solution over 40 minutes at 15-20° C. No nucleation was observed, and additional isopropyl acetate (6.6L, 18 volumes) was charged dropwise slowly in 40 min at 15-20° C. leading to precipitation of the product 12 which was collected by filtration as an off yellow solid. The solid was dissolved in acetonitrile (330 ml, 1 volume) and IPAc (6.6L, 20 volumes) was charged dropwise slowly in 40 min at 15-20° C. The mixture was filtered to yield 230g of product as an off-yellow solid (LCAP: 80.99%, QNMR: 59%, 10% IPAc). The wet cake was dried under vacuum in 2 hours at 15-20° C., to give 224g of crude 12 as an off-yellow solid (LCAP: 80.9%, QNMR: 60.4%, ˜6% IPAc). The crude 12 was redissolved in acetonitrile (330 ml, 1 volumes) and isopropyl acetate (412 ml, 1.25 volumes) was charged dropwise slowly in 40 min at 15-20° C. The resulting mixture was filtered, and 12 was collected (30.5 g, HPLC=60.9%, assay: 25.5%). The mother liquors were diluted with isopropyl acetate (6.6L, 20 volumes) added over 40 minutes at 15-20° C. The mixture was filtered, and the cake was dried to afford 173.5 g of crude product 12 as an off-yellow solid (LCAP: 85.4%, QNMR: 66%, 3.9% IPAc, RRT1.19=3.9%). 190 g of crude 12 product was dissolved in 760 mL of acetonitrile: isopropyl acetate (2:1) and the mixture was passed through a silica gel column (380 g, 2 ×). The silica was flushed with acetonitrile: isopropyl acetate (2:1, 5.7L) and then 12L acetonitrile (very little product). Product containing fraction were the concentrated to afford 118g of product 12 as an off-yellow solid (LCAP: 95%). The silica pad was then flushed with MeCN/H₂O (12L, 10:1). The solvents were removed in vacuo to afford and additional 60 g crude 12 as an off-yellow solid which was dissolved in acetonitrile (1.5L), stirred for 30 min then filtered. The mother liquor were then concentrated to afford 24g of crude 12 as an off-yellow solid (LCAP=92%). crude 12 (118 g) and crude 12 (24 g) prepared as above were dissolved in acetonitrile (330 ml, 1 volume) and isopropyl acetate (6.6L, 20 volumes) was charge dropwise over 40 min 15-20° C. The mixture was then filtered to afford 133g of 12 product as off-yellow solid of suitable purity (LCAP: 95%, QNMR: 60.8%, 7.8% IPAc). Note, compound 12 required storage at −20° C. LCMS: (ES,m/z): 666.61 [M-TfONa-2Na+3H]⁺¹H-NMR: (400 MHZ, methanol-d4, ppm): δ 8.00 (ddd, J=13.8, 7.7, 1.0 Hz, 2H), 7.84 (dt, J=20.4,7.7 Hz, 2H), 7.58-7.49 (m, 2H), 7.40 (dd, J=7.6, 1.0 Hz, 1H), 7.36-7.28 (m, 2H), 7.28-7.20 (m, 1H), 4.96 (hept, J=6.3 Hz, 1H), 3.96-3.88 (m, 1H), 3.83 (d, J=15.1 Hz, 1H), 3.70-3.52 (m, 11H), 3.55-3.39 (m, 4H), 3.07-2.73 (m, 6H), 2.62 (dt, J=15.1, 3.6 Hz, 2H).

### Example 20

### TOPA-[C₇]-phenylthiourea-h11B6 Antibody Conjugate

[chemical structure]

[0728] (In the TOPA-[C₇]-phenylthiourea-h11B6 Antibody Conjugate depicted above, the structure does not show the lysine residue of h11b6 that is linked to the phenylthiourea moiety.)

[0729] TOPA-[C₇]-phenylthiourea modification of mAb;
[0730] h11b6 mAb (10.2 mg/ml) was diluted to 1 mg/ml in 10 mM sodium acetate pH 5.2 buffer. Directly prior to conjugation, pH was adjusted to pH 9 with sodium bicarbonate buffer (VWR 144-55-8), pH was confirmed with pH paper. Then, 10× molar excess of disodium salt TOPA-[C₇]-phenylisothiocyanate sodium salt (50 mM stock dissolved in water) was added to the h11b6 mAb, and the mixture of antibody and TOPA-[C₇]-phenylisothiocyanate sodium salt was incubated at room temperature without shaking for approximately 1 hour. The addition of TOPA-[C₇]-phenylisothiocyanate sodium salt was monitored by intact mass ESI-TOF LC-MS on an Agilent® G224 instrument until the CAR value was between 1.5-2.0. The mixture was then immediately quenched by addition of 1M Tris pH 8.5 (Teknova T1085) to a final concentration of 100 mM. Excess free chelator was removed by desalting the reaction into 10 mM sodium acetate pH 5.2 using a 7K Zeba® desalting column. To confirm no excess chelator was present, 3× rounds of sample dilution to 15mls followed by concentration to 1 ml using a 50,000MWCO Amicon concentrator device was performed. Sample was then concentrated to its final concentration for radiolabeling. The final conjugate was confirmed to be monomeric by analytical size exclusion chromatography on a Tosoh TSKgel G3000SWx1 7.8 mm ×30 cm, 5 u column; column temperature: room temperature; the column was eluted 0.2M sodium phosphate pH 6.8; flow rate: 0.8 mL/min; 18 min run; injection volume: 18 ul.

### Example 21

### Ac-225 labeled TOPA-[C₇]-phenylthiourea-h11B6 antibody conjugate

[chemical structure]

[0731] (In the Ac-225 labeled TOPA-[C₇]-phenylthiourea-h11B6 Antibody Conjugate depicted above, the structure does not show the lysine residue of h11b6 that is linked to the phenylthiourea moiety.)

[0732] (i) Labeling of TOPA-[C₇]-phenylthiourea-h11B6 with Ac-225 in 3M NaOAc buffer;
[0733] To a solution of NaOAc (3 M in H₂O, 60 μL) in a plastic vial were added sequentially Ac-225 (10 mCi/mL in 0.1 N HCl, 15 μL) and TOPA-[C₇]-phenylthiourea-h11B6 (1.13 mg/mL in 10 mM NaOAc pH=5.5, 441 μL, 0.5 mg). After mixing, the pH was ˜ 6.5 by pH paper. The vial was left standing still at 37° C. for 2 hr.
   iTLC Of the Labeling Reaction Mixture:

[0734] 0.5 μL of the labeling reaction mixture was loaded onto an iTLC-SG, which was developed with 10 mM EDTA (pH 5-6). The dried iTLC-SG was left at room temperature for overnight before it was scanned on a Bioscan AR-2000 radio-TLC scanner. Under the elution conditions described herein, TOPA-[C₇]-phenylthiourea-h11B6 bound Ac-225 stayed at the origin and any free Ac-225 would migrate with the solvent to the solvent front. Scanning of the iTLC showed 99.9% TOPA-[C₇]-phenylthiourea-h11B6 bound Ac-225.

### DTPA Challenge of the Labeling Reaction Mixture:

[0735] 0.5 μL of the labeling reaction mixture was also mixed with 10 mM DTPA (pH=6.5, 15 μL) at 37° C. After 30 min, 10 μL of the mixture was spotted on iTLC-SG and developed by 10 mM EDTA. The dried iTLC-SG was left at room temperature for overnight before it was scanned on a Bioscan AR-2000 radio-TLC scanner. Under the elution conditions described herein, TOPA-[C₇]-phenylthiourea-h11B6 chelated Ac-225 ^{st} ayed at the origin and any free Ac-225 would migrate with the solvent to the solvent front. Scanning of the iTLC showed 99.7% TOPA-[C₇]-phenylthiourea-h11B6 chelated Ac-225.

### Purification on PD10 Column:

[0736] The PD-10 resin was conditioned in NaOAc buffer solution by passing 5 mL X 3 of NaOAc buffer (25 mM NaOAc, 0.04% PS-20, pH 5.5)through column and discarding the washings. The entire labeling reaction mixture was applied to the reservoir of the column and the eluate collected in pre-numbered plastic tubes. The reaction vial was washed with 0.2 mL X 3 NaOAc buffer (25 mM NaOAc, 0.04% PS-20, pH 5.5) and the washings pipetted into the reservoir of the

[0737] PD-10 column and the eluate collected. Each tube contained ˜1 mL of the eluate. Continued application of NaOAc buffer (25 mM NaOAc, 0.04% PS-20, pH 5.5) into the reservoir of the PD-10 column occurred until a total elution volume of 10 mL was reached. The radiochemical purity of fractions collected were checked by iTLC: 10 μL of each collected fraction was spotted on iTLC-SG and developed with 10 mM EDTA. The dried iTLC-SG was left at room temperature for overnight before it was scanned on a Bioscan AR-2000 radio-TLC scanner. Pure fraction should have no radioactivity signal at the solvent front of the iTLC-SG.

DTPA challenge of the purified ²²⁵Ac-TOPA-| (′7]-phenylthiourea-h11B6:

[0738] 10 μL of fraction #3 collected after PD-10 column was mixed with 15 μL of 10 mM DTPA solution (pH 6.5), and incubated for 30 min. 10 μL of the mixture was loaded onto an iTLC-SG, which was developed with 10 mM EDTA and dried overnight. It was scanned on a Bioscan AR-2000 radio-TLC scanner. No radioactivity signal was observed at the solvent front of the iTLC-SG indicating that there was no free Ac-225 in the fraction #3.

[0739] HPLC analysis of the purified ²²⁵Ac-TOPA- [(7]-phenylthiourea-h11B6;
[0740] The fraction #3 collected after PD-10 column was analyzed by HPLC. HPLC method: Tosoh

[0741] TSKgel G3000SWx1 7.8 mm×30 cm, 5 μm column; column temperature: room temperature; the column was eluted with DPBS buffer (X1, without calcium and magnesium); flow rate: 0.7 mL/min; 20 min run; injection volume: 40 μL. After HPLC, the fractions were collected in time intervals of 30 seconds or 1 minute. The collected HPLC fractions were left at room temperature overnight. The radioactivity in each of the collected fractions was counted in a gamma counter.

[0742] The HPLC radio trace was constructed from the radioactivity in each HPLC fraction. HPLC radio trace showed a radioactive peak corresponding to the TOPA-[C₇]-phenylthiourea-h11B6 peak on HPLC UV trace.

[0743] (ii) Labeling of TOPA-[C₇]-phenylthiourea-h11B6 at higher concentration with Ac-225 in 1.5 M NaOAc buffer;
[0744] To a solution of NaOAc (1.5 M in H₂O with 0.04% PS-20, 63 μL) in a plastic vial were added sequentially Ac-225 (10 mCi/mL in 0.1 N HCl, 10 μL) and TOPA-[C₇]-phenylthiourea-h11B6 (9.36 mg/mL in 10 mM NaOAc pH=5.2, 0.04% PS-20, 36 μL, 337 ug). After mixing, the pH was ˜ 6.5 by pH paper. The vial was left standing still at 37° C. for 2 hr. iTLC of the labeling reaction mixture;
[0745] 0.5 μL of labeling reaction mixture was then loaded onto an iTLC-SG, which was developed with 10 mM EDTA. The dried iTLC-SG was left at room temperature for overnight before it was scanned on a Bioscan AR-2000 radio-TLC scanner. Under the elution conditions described herein, TOPA-[C₇]-phenylthiourea-h11B6 bounded Ac-225 ^{st} ayed at the origin and any free Ac-225 would migrate with the solvent to the solvent front. Scanning of the iTLC showed 99.9% TOPA-[C₇]-phenylthiourea-h11B6 bonded Ac-225.

[0746] DTPA challenge of the labeling reaction mixture;
[0747] 0.5 μL of the labeling reaction mixture was also mixed with 10 mM DTPA (pH=6.5, 15 μL) at 37° C. After 30 min, 10 μL of the mixture was spotted on iTLC-SG and developed by 10 mM EDTA. The dried iTLC-SG was left at room temperature for overnight before it was scanned on a Bioscan AR-2000 radio-TLC scanner. Under the elution conditions described herein, TOPA-[C₇]-phenylthiourea-h11B6 chelated Ac-225 ^{st} ayed at the origin and any free Ac-225 would migrate with the solvent to the solvent front. Scanning of the iTLC showed 99.9% TOPA-[C₇]-phenylthiourea-h11B6 chelated Ac-225.

[0748] (iii) Labeling of TOPA-[C₇]-phenylthiourea-h11B6 at higher concentration with Ac-225 in 1 M NaOAc buffer;
[0749] To a solution of NaOAc (1.0 M in H₂O with 0.04% PS-20, 63 μL) in a plastic vial were added sequentially Ac-225 (10 mCi/mL in 0.1 N HCl, 10 μL) and TOPA-[C₇]-phenylthiourea-h11B6 (9.36 mg/mL in 10 mM NaOAc pH=5.2, 0.04% PS-20, 36 μL, 337 ug). After mixing, the pH was ˜ 6.5 by pH paper. The vial was left standing still at 37° C. for 2 hr.

[0750] iTLC of the labeling reaction mixture:

[0751] 0.5 μL of labeling reaction mixture was then loaded onto an iTLC-SG, which was developed with 10 mM EDTA. The dried iTLC-SG was left at room temperature for overnight before it was scanned on a Bioscan AR-2000 radio-TLC scanner. Under the elution conditions described herein, TOPA-[C₇]-phenylthiourea-h11B6 bound Ac-225 ^{st} ayed at the origin and any free Ac-225 would migrate with the solvent to the solvent front. Scanning of the iTLC showed 99.9% TOPA-[C₇]-phenylthiourea-h11B6 bonded Ac-225.

[0752] DTPA challenge of the labeling reaction mixture;
[0753] 0.5 μL of the labeling reaction mixture was also mixed with 10 mM DTPA (pH=6.5, 15 μL) at 37° C. After 30 min, 10 μL of the mixture was spotted on iTLC-SG and developed by 10 mM

[0754] EDTA. The dried iTLC-SG was left at room temperature for overnight before it was scanned on a Bioscan AR-2000 radio-TLC scanner. Under the elution conditions described herein, TOPA-[C₇]-phenylthiourea-h11B6 chelated Ac-225 ^{st} ayed at the origin and any free Ac-225 would migrate with the solvent to the solvent front. Scanning of the iTLC showed 99.9% TOPA-[C₇]-phenylthiourea-h11B6 chelated Ac-225.

Labeling of TOPA-| (′7]-phenylthiourea-h11B6 at higher concentration with Ac-225 in 25 mM NaOAc with 0.4% tween-20, pH 5.5:

[0755] To a solution of NaOAc (25 mM in H₂O with 0.04% PS-20, pH 5.5, 10 μL) in a plastic vial were added sequentially Ac-225 (10 mCi/mL in 0.1 N HCl, 5 μL), TOPA-[C₇]-phenylthiourea-h11B6 (10.4 mg/mL in 10 mM NaOAc pH=5.2, 16 μL, 166 ug) and NaOH (0.1 M, 5 μL). After mixing, the pH was ˜ 6.0 by pH paper. The vial was left standing still at 37° C. for 2 hr.

iTLC Of the Labeling Reaction Mixture:

[0756] 0.5 μL of labeling reaction mixture was then loaded onto an iTLC-SG, which was developed with 10 mM EDTA. The dried iTLC-SG was left at room temperature for overnight before it was scanned on a Bioscan AR-2000 radio-TLC scanner. Under the elution conditions described herein, TOPA-[C₇]-phenylthiourea-h11B6 bound Ac-225 ^{st} ayed at the origin and any free Ac-225 would migrate with the solvent to the solvent front. Scanning of the iTLC showed 99.9% TOPA-[C₇]-phenylthiourea-h11B6 bonded Ac-225.

### DTPA Challenge of the Labeling Reaction Mixture:

[0757] 0.5 uL of the labeling reaction mixture was also mixed with 10 mM DTPA (pH=6.5, 15 μL) at 37° C. After 30 min, 10 μL of the mixture was spotted on iTLC-SG and developed by 10 mM EDTA. The dried iTLC-SG was left at room temperature for overnight before it was scanned on a Bioscan AR-2000 radio-TLC scanner. Under the elution conditions described herein, TOPA-[C₇]-phenylthiourea-h11B6 chelated Ac-225 ^{st} ayed at the origin and any free Ac-225 would migrate with the solvent to the solvent front. Scanning of the iTLC showed 99.8% TOPA-[C₇]-phenylthiourea-h11B6 chelated Ac-225.

### Reaction conditions for labeling of TOPA-[C₇₁-phenylthiourea-h11B6 with Ac-225

| TOPA-[C7]- | Buffer for | Radiochemical | |
|---|---|---|---|
| phenylthiourea- | Labeling | yield | DTPA |
| h11B6 in buffer | reaction | (iTLC) | challenge |
| 1.13 mg/mL in 10 | 3M NaOAc | >99% | >99% |
| mM NaOAc pH = 5.5 | | | |
| 9.36 mg/mL in 10 | 1.5M NaOAc, | >99% | >99% |
| mM NaOAc, pH = 5.2; | 0.04% PS-20 | | |
| 0.04% PS-20 | | | |
| 9.36 mg/mL in 10 | 1.0M NaOAc, | >99% | >99% |
| mM NaOAc, pH = 5.2; | 0.04% PS-20 | | |
| 0.04% PS-20 | | | |
| 10.4 mg/mL in 10 | 25 mM in | >99% | >99% |
| mM NaOAc, pH = 5.2 | NaOAc, 0.04% | | |
| | PS-20, pH 5.5 | | |

### Example 22-Generation of Anti-KLK2 Antibodies

### Antibody Generation Using Transgenic Mice (Ablexis®) and Transgenic Rats (OmniRat® Expressing Human Immunoglobulin Loci

[0758] The OmniRat® contains a chimeric human/rat IgH locus (comprising 22 human VHs, all human D and JH segments in natural configuration linked to the rat CH locus) together with fully human IgL loci (12 Vks linked to JK-CK and 16 Vis linked to JA -CA) (see, e.g., Osborn, et al., J Immunol, 2013, 190(4); 1481-90). Accordingly, the rats exhibit reduced expression of rat immunoglobulin, and in response to immunization, the introduced human heavy and light chain transgenes undergo class switching and somatic mutation to generate high affinity chimeric human/rat IgG monoclonal antibodies with fully human variable regions. The preparation and use of OmniRat®, and the genomic modifications carried by such rats, is described in International Publication No. WO14/093908. Ablexis® mice generate antibodies having human variable domains linked to human CH1 and CL domains, chimeric human/mouse hinge regions, and mouse Fc regions. Ablexis Kappa Mouse and Lambda Mouse strains are distinguished by which of their heavy chains are human or mouse as noted below. Antibodies produced by the Kappa Mouse lack sequences derived from mouse VH, DH and JH exons and mouse Vκ, Jκ and Cκ exons. The endogenous mouse Igλ is active in the Kappa Mouse. The human Igλ chains comprise approximately 90-95% of the naïve repertoire and mouse Igλ chains comprise approximately 5-10% of the naïve repertoire in this strain. Antibodies produced by the Lambda Mouse lack sequences derived from mouse VH, DH and JH exons and mouse VA, JA and CA exons. The endogenous mouse Igλ is active in the Lambda Mouse. The human Iga chains comprise approximately 40% of the naïve repertoire and mouse Igλ chains comprise approximately 60% of the naïve repertoire. The preparation and use of Ablexis®, and the genomic modifications carried by such mice, is described in International Publication No. WO11/123708. Ablexis® mice and OmniRats® rats were immunized with soluble full length KLK2 protein (human kallikrein-2 6-His protein, with an amino acid sequence of

(SEQ ID NO: 454)
VPLIEGRIVGGWECEKHSQPWQVAVYSHGWAHCGGVLVHPQWVLTAAHCL
KKNSQVWLGRHNLFEPEDTGQRVPVSHSFPHPLYNMSLLKHQSLRPDEDS
SHDLMLLRLSEPAKITDVVKVLGLPTQEPALGTTCYASGWGSIEPEEFLR
PRSLQCVSLHYSEKVTEFMLCAGLWTGGKDTCGGDSGGPLVCNGVLQGIT
SWGPEPCALPEKPAVYTKVVHYRKWIKDTIAANPHHHHHH.

[0759] Lymphocytes from Ablexis mice and OniRats rats were extracted from lymph nodes and fusions performed by cohorts. Cells were combined and sorted for CD₁₃₈ expression. Hybridoma screening was performed in high throughput miniaturized MSD format using soluble hK2 antigen. Approximately >300 samples were identified to be hK2 binders. The binding of >300 anti-hKLK2 supernatant samples to human KLK2 protein was measured by single cycle kinetics method by Biacore 8K SPR. Additionally the supernatant samples were tested for binding to human KLK3 protein as well. In parallel, supernatants were also tested for binding to KLK2 expressing cell lines VCap and negative cell line DU145 by Flow Cytometry. Selected cell binders were moved forward to scFv conversion in both VH-VL and VL/VH orientation and thermal stability tests as described above. KL2B413, KL2B30, KL2B53 and KL2B242 resulted from the Ablexis mice immunization campaign. KL2B467 and KL2B494 resulted from the OmniRat immunization campaign.

[0760] Antibodies generated through the various immunization and humanization campaigns described above were expressed in a fab format, a mAb format, a scFv format in the VH-linker-VL orientation or a scFv format in VL-linker-VH orientation and were further analyzed as described below. The linker sequence of SEQ ID NO: 7 described above was used to conjugate the VH/VL regions.

### Example 23. Structural Characterization of Anti KLK2 Antibodies

[0761] Sequences of antibody variable domains and scFv antibody fragments which showed highest performance in intracellular assay are provided herein. Variable domains were expressed in a Fab format, a scFv format in the VH-linker-VL orientation or a scFv format in VL-linker-VH orientation.

Variable domains VH, VL and CDRs

[0762] Table 3 shows the VH and VL amino acid sequences of selected anti-hK2 antibodies. Table 4 shows the Kabat HCDR1, HCDR2 and HCDR3 of selected anti-hK2 selected antibodies. Table 5 shows the Kabat LCDR1, LCDR2 and LCDR3 of the selected anti-hK2 antibodies. Table 6 shows the AbM HCDR1, HCDR2 and HCDR3 of selected anti-hK2 antibodies. Table 7 shows the AbM LCDR1, LCDR2 and LCDR3 of the anti-hK2. Table 8 summarizes the variable domain sequence and SEQ ID NO of selected hK2 antibodies. Table 9 shows the protein and DNA SEQ ID NOs for the VH and VL regions.

TABLE 3
VH and VL amino acid sequences of selected anti-hK2 antibodies.

| | | | VH | | | VL |
|---|---|---|---|---|---|---|
| | | | SEQ | | | SEQ |
| | | VH amino acid | ID | | VL amino acid | ID |
| Ab name | VH name | Sequence | NO: | VL name | sequence | NO: |
| m11B6 | m11B6_ | DVQLQESGPGLV | 125 | m11B6_ | DIVLTQSPASLAVS | 124 |
| | VH | KPSQSLSLTCTVT | | VL | LGQRATISCRASES | |
| | | GNSITSDYAWNW | | | VEYFGTSLMHWYR | |
| | | IRQFPGNRLEWM | | | QKPGQPPKLLIYAA | |
| | | GYISYSGSTTYSP | | | SNVESGVPARFSGS | |
| | | SLKSRFSITRDTS | | | GSGTDFSLNIQPVE | |
| | | KNQFFLQLNSVTP | | | EDDFSMYFCQQTR | |
| | | EDTATYFCATGY | | | KVPYTFGGGTKLEI | |
| | | YYGSGFWGQGTL | | | K | |
| | | VTVSS | | | | |
| h11B6 | hu11B6_ | QVQLQESGPGLV | 5 | hu11B6_ | DIVLTQSPDSLAVS | 2 |
| | VH | KPSDTLSLTCAVS | | VL | LGERATINCKASES | |
| | | GNSITSDYAWNW | | | VEYFGTSLMHWYQ | |
| | | IRQPPGKGLEWIG | | | QKPGQPPKLLIYAA | |
| | | YISYSGSTTYNPS | | | SNRESGVPDRFSGS | |
| | | LKSRVTMSRDTS | | | GSGTDFTLTISSLQA | |
| | | KNQFSLKLSSVTA | | | EDVAVYYCQQTRK | |
| | | VDTAVYYCATGY | | | VPYTFGQGTKLEIK | |
| | | YYGSGFWGQGTL | | | | |
| | | VTVSS | | | | |
| HCF3- | HCF3_ | QVQLQESGPGLV | 6 | LCD6_ | DIVLTQSPDSLAVS | 1 |
| LCD6 | VH | KPSDTLSLTCAVS | | VL | LGERATINCKASES | |
| | | GNSITSDYAWNW | | | VEYFGTSLMHWYQ | |
| | | IRQFPGKGLEWIG | | | QKPGQPPKLLIYAA | |
| | | YISYSGSTTYNPS | | | SNRESGVPDRFSGS | |
| | | LKSRVTISRDTSK | | | GSGTDFTLTIQSVQ | |
| | | NQFSLKLSSVTPV | | | AEDVSVYFCQQTR | |
| | | DTAVYYCATGYY | | | KVPYTFGQGTKLEI | |
| | | YGSGFWGQGTLV | | | K | |
| | | TVSS | | | | |
| HCG5- | HCG5_ | QVQLQESGPGLV | 4 | LCB7_ | DIVLTQSPDSLAVS | 3 |
| LCB7 | VH | KPSDTLSLTCAVS | | VL | LGERATINCKASES | |
| | | GNSITSDYAWNW | | | VEYFGTSLMHWYQ | |
| | | IRQFPGKGLEWM | | | QKPGQPPKLLIYAA | |
| | | GYISYSGSTTYNP | | | SNRESGVPDRFSGS | |
| | | SLKSRVTISRDTS | | | GSGTDFTLTISSVQ | |
| | | KNQFSLKLSSVTP | | | AEDVAVYYCQQTR | |
| | | VDTAVYYCATGY | | | KVPYTFGQGTKLEI | |
| | | YYGSGFWGQGTL | | | K | |
| | | VTVSS | | | | |
| KL2B357 | KL2B357_ | QVQLQESGPGLV | 159 | KL2B357_ | DIVLTQSPDSLAVS | 160 |
| | VH | KPSQTLSLTCTVS | | VL | LGERATINCRASES | |
| | | GNSITSDYAWNW | | | VEYFGTSLMHWYQ | |
| | | IRQFPGKGLEWIG | | | QKPGQPPKLLIYAA | |
| | | YISYSGSTTYNPS | | | SNVESGVPDRFSGS | |
| | | LKSRVTISRDTSK | | | GSGTDFTLTISSLQA | |
| | | NQFSLKLSSVTAA | | | EDVAVYFCQQTRK | |
| | | DTAVYYCATGYY | | | VPYTFGGGTKVEIK | |
| | | YGSGFWGQGTLV | | | | |
| | | TVSS | | | | |
| KL2B358 | KL2B358_ | QVQLQESGPGLV | 161 | KL2B358_ | EIVLTQSPATLSLSP | 140 |
| | VH | PSQTLSLTCTVSGN | | VL | GERATLSCRASESV | |
| | | TSDYAWNWIRQPP | | | EYFGTSLMHWYQQ | |
| | | KGLEWIGYISYSGS | | | KPGQPPRLLIYAAS | |
| | | TYNPSLKSRVTISR | | | NVESGIPARFSGSG | |
| | | TSKNQFSLKLSSVT | | | SGTDFTLTISSVEPE | |
| | | ADTAVYYCATGY | | | DFAVYFCQQTRKV | |
| | | YGSGFWGQGTLVT | | | PYTFGGGTKVEIK | |
| | | SS | | | | |
| KL2B359 | KL2B359_ | QVQLQESGPGLV | 139 | KL2B359_ | EIVLTQSPATLSLSP | 140 |
| | VH | KPSQTLSLTCTVS | | VL | GERATLSCRASESV | |
| | | GNSITSDYAWNW | | | EYFGTSLMHWYQQ | |
| | | IRQFPGKRLEWIG | | | KPGQPPRLLIYAAS | |
| | | YISYSGSTTYNPS | | | NVESGIPARFSGSG | |
| | | LKSRVTISRDTSK | | | SGTDFTLTISSVEPE | |
| | | NQFSLKLSSVTAA | | | DFAVYFCQQTRKV | |
| | | DTAVYYCATGYY | | | PYTFGGGTKVEIK | |
| | | YGSGFWGQGTLV | | | | |
| | | TVSS | | | | |
| KL2B360 | KL2B360_ | QVQLQESGPGLV | 159 | KL2B360_ | EIVLTQSPATLSLSP | 140 |
| | VH | KPSQTLSLTCTVS | | VL | GERATLSCRASESV | |
| | | GNSITSDYAWNW | | | EYFGTSLMHWYQQ | |
| | | IRQFPGKGLEWIG | | | KPGQPPRLLIYAAS | |
| | | YISYSGSTTYNPS | | | NVESGIPARFSGSG | |
| | | LKSRVTISRDTSK | | | SGTDFTLTISSVEPE | |
| | | NQFSLKLSSVTAA | | | DFAVYFCQQTRKV | |
| | | DTAVYYCATGYY | | | PYTFGGGTKVEIK | |
| | | YGSGFWGQGTLV | | | | |
| | | TVSS | | | | |
| KL2B413 | KL2B413_ | EVQLVESGGGLV | 137 | KL2B413_ | EIVLTQSPSFLSASV | 138 |
| | VH | QPGGSLRLSCAAS | | VL | GDRVTITCRASQGI | |
| | | GFTFSSYWMTWV | | | SSYLSWYQQKPGK | |
| | | RQAPGKGLEWV | | | APKLLIYATSTLQS | |
| | | ANIKQDGSERYY | | | GVPSRFSGSGSGTE | |
| | | VDSVKGRFTISRD | | | FTLTISSLQPEDFAT | |
| | | NAKNSLYLQMNS | | | YYCQQLNSYPRTF | |
| | | LRAEDTAVYYCA | | | GQGTKVEIK | |
| | | RDQNYDILTGHY | | | | |
| | | GMDVWGQGTTV | | | | |
| | | TVSS | | | | |
| KL2B30 | KL2B30_ | QVQLQESGPGLV | 162 | KL2B30_ | DIQMTQSPSFLSAS | 163 |
| | VH | KPSETLSLTCTVS | | VL | VGDRVTITCRASQG | |
| | | GGSISSYYWSWIR | | | ISSYLAWYQQKPG | |
| | | QPPGKGLEWIGYI | | | KAPKFLIYAASTLQ | |
| | | YYSGSTNYNPSL | | | SGVPSRFSGSGSGT | |
| | | KSRVTISVDTSKN | | | EFTLTISSLQPEDFA | |
| | | QFSLKLSSVTAAD | | | TYYCQQLNSYPLTF | |
| | | TAVYYCAGTTIF | | | GGGTKVEIK | |
| | | GVVTPNFYYGMD | | | | |
| | | VWGQGTTVTVSS | | | | |
| KL2B53 | KL2B53_ | EVQLVESGGGVV | 164 | KL2B53_ | DIVMTQSPSSLSAS | 165 |
| | VH | QPGRSLRLSCVAS | | VL | VGDRVTITCRASQD | |
| | | GFTFSSYDIHWVR | | | ISNYLAWYQQKPG | |
| | | QAPGKGLEWVAI | | | KVPKFLIYAASTLH | |
| | | ISYDGSKKDYTDS | | | SGVPSRFSGSGSGT | |
| | | VKGRFTISRDNSK | | | DFTLTISSLQPEDVA | |
| | | NTLYLQMDSLRV | | | TYYCQKYNSAPYT | |
| | | EDSAVYSCARES | | | FGQGTRLEIK | |
| | | GWSHYYYYGMD | | | | |
| | | VWGQGTMVTVS | | | | |
| | | S | | | | |
| KL2B242 | KL2B242_ | QVQLQESGPGLV | 166 | KL2B242_ | SYELTQPPSVSVSP | 167 |
| | VH | KPSETLSLTCTVS | | VL | GETASITCSGDQLG | |
| | | GGSISSYYWSWL | | | ENYACWYQQKPG | |
| | | RQPAGSGLEWIG | | | QSPVLVIYQDSKRP | |
| | | RLYVSGFTNYNP | | | SGIPERFSGSNSGNT | |
| | | SLKSRVTLSLDPS | | | ATLTISGTQALDEA | |
| | | RNQLSLKLSSVTA | | | DYYCQAWDNSIVV | |
| | | ADTAVYYCAGDS | | | FGGGTKLTVL | |
| | | GNYWGWFDPWG | | | | |
| | | QGTLVTVSS | | | | |
| KL2B467 | KL2B467_ | QVQLVESGGGVV | 168 | KL2B467_ | QSVLTQPPSVSVAP | 169 |
| | VH | QPGRSLRLSCAAS | | VL | GQTASITCGGDNIG | |
| | | GFTFSYYGMHW | | | SKSVHWYQQKPGQ | |
| | | VRQAPGKGLEW | | | APVLVVYDNSDRP | |
| | | VAFISYDGSNKY | | | SGIPERFSGSNSGTT | |
| | | YADSVKGRFTISR | | | ATLTISRVEAGDEA | |
| | | DNSKNTLYLQMN | | | DYYCQVWDSSSDH | |
| | | SLRAEDTAVYYC | | | PVVFGGGTKVTV | |
| | | AHLPYSGSYWAF | | | | |
| | | DYWGQGTQVTV | | | | |
| | | SS | | | | |
| KL2B494 | KL2B494_ | QVQLVESGGGLV | 204 | KL2B494_ | SSELTQPPSVSVAP | 205 |
| | VH | QPGGSLRLSCAAS | | VL | GQTARITCGGNNIG | |
| | | GFTFSHYAMSWV | | | SKSVHWYQQKPGQ | |
| | | RQAPGKGLEWVS | | | APVLVVYDDSDRP | |
| | | TIGGSGGSTYYA | | | SGIPERFSGSNSGNT | |
| | | DSVKGRFTISRDN | | | ATLTISRVEAGDEA | |
| | | SKNTLYLQMNSL | | | DYYCQVWDSSSDH | |
| | | RAEDTAVYYCAK | | | VVFGGGTKLTVL | |
| | | PHIVMVTALLYD | | | | |
| | | GMDVWGQGTMV | | | | |
| | | TVSS | | | | |
| KL2B242 | KL2B242_ | QVQLQESGPGLV | 166 | KL2B242LC_ | SYELTQPPSVSVSP | 444 |
| LC_C33S | VH | KPSETLSLTCTVS | | C33S_ | GETASITCSGDQLG | |
| | | GGSISSYYWSWL | | VL | ENYASWYQQKPGQ | |
| | | RQPAGSGLEWIG | | | SPVLVIYQDSKRPS | |
| | | RLYVSGFTNYNP | | | GIPERFSGSNSGNT | |
| | | SLKSRVTLSLDPS | | | ATLTISGTQALDEA | |
| | | RNQLSLKLSSVTA | | | DYYCQAWDNSIVV | |
| | | ADTAVYYCAGDS | | | FGGGTKLTVL | |
| | | GNYWGWFDPWG | | | | |
| | | QGTLVTVSS | | | | |

TABLE 4
Kabat HCDR1, HCDR2 and HCDR3 amino acid sequences of selected anti-KLK2 antibodies.

| | | SEQ | | SEQ | | SEQ |
|---|---|---|---|---|---|---|
| | Kabat HCDR1 | ID | Kabat HCDR2 | ID | Kabat HCDR3 | ID |
| Ab name | Sequence | NO | Sequence | NO | Sequence | NO |
| m11B6 | SDYAWN | 63 | YISYSGSTTYSPSLKS | 64 | GYYYGSGF | 66 |
| hu11B6 | SDYAWN | 63 | YISYSGSTTYNPSLKS | 65 | GYYYGSGF | 66 |
| HCF3- | SDYAWN | 63 | YISYSGSTTYNPSLKS | 65 | GYYYGSGF | 66 |
| LCD6 | | | | | | |
| HCG5- | SDYAWN | 63 | YISYSGSTTYNPSLKS | 65 | GYYYGSGF | 66 |
| LCB7 | | | | | | |
| KL2B357 | SDYAWN | 63 | YISYSGSTTYNPSLKS | 65 | GYYYGSGF | 66 |
| KL2B358 | SDYAWN | 63 | YISYSGSTTYNPSLKS | 65 | GYYYGSGF | 66 |
| KL2B359 | SDYAWN | 63 | YISYSGSTTYNPSLKS | 65 | GYYYGSGF | 66 |
| KL2B360 | SDYAWN | 63 | YISYSGSTTYNPSLKS | 65 | GYYYGSGF | 66 |
| KL2B413 | SYWMT | 141 | NIKQDGSERYYVDSV | 142 | DQNYDILTGHY | 143 |
| | | | KG | | GMDV | |
| KL2B30 | SYYWS | 170 | YIYYSGSTNYNPSLKS | 171 | TTIFGVVTPNFY | 172 |
| | | | | | YGMDV | |
| KL2B53 | SYDIH | 176 | IISYDGSKKDYTDSVK | 177 | ESGWSHYYYY | 178 |
| | | | G | | GMDV | |
| KL2B242 | SYYWS | 170 | RLYVSGFTNYNPSLKS | 183 | DSGNYWGWFD | 184 |
| | | | | | P | |
| KL2B467 | YYGMH | 188 | FISYDGSNKYYADSV | 189 | LPYSGSYWAFD | 190 |
| | | | KG | | Y | |
| KL2B494 | HYAMS | 206 | TIGGSGGSTYYADSVK | 207 | PHIVMVTALLY | 208 |
| | | | G | | DGMDV | |

TABLE 5
Kabat LCDR1, LCDR2 and LCDR3 amino acid sequences of selected anti-hK2 antibodies.

| | | SEQ | | SEQ | | SEQ |
|---|---|---|---|---|---|---|
| | Kabat LCDR1 | ID | Kabat LCDR2 | ID | Kabat LCDR3 | ID |
| Ab name | Sequence | NO | Sequence | NO | Sequence | NO |
| m11B6 | RASESVEYFGTSLMH | 67 | AASNVES | 69 | QQTRKVPYT | 71 |
| hu11B6 | KASESVEYFGTSLMH | 68 | AASNRES | 70 | QQTRKVPYT | 71 |
| HCF3- | KASESVEYFGTSLMH | 68 | AASNRES | 70 | QQTRKVPYT | 71 |
| LCD6 | | | | | | |
| HCG5- | KASESVEYFGTSLMH | 68 | AASNRES | 70 | QQTRKVPYT | 71 |
| LCB7 | | | | | | |
| KL2B357 | RASESVEYFGTSLMH | 67 | AASNVES | 69 | QQTRKVPYT | 71 |
| KL2B358 | RASESVEYFGTSLMH | 67 | AASNVES | 69 | QQTRKVPYT | 71 |
| KL2B359 | RASESVEYFGTSLMH | 67 | AASNVES | 69 | QQTRKVPYT | 71 |
| KL2B360 | RASESVEYFGTSLMH | 67 | AASNVES | 69 | QQTRKVPYT | 71 |
| KL2B413 | RASQGISSYLS | 144 | ATSTLQS | 145 | QQLNSYPRT | 146 |
| KL2B30 | RASQGISSYLA | 173 | AASTLQS | 174 | QQLNSYPLT | 175 |
| KL2B53 | RASQDISNYLA | 179 | AASTLHS | 180 | QKYNSAPYT | 181 |
| KL2B242 | SGDQLGENYAC | 185 | QDSKRPS | 186 | QAWDNSIVV | 187 |
| KL2B467 | GGDNIGSKSVH | 191 | DNSDRPS | 192 | QVWDSSSDH | 193 |
| | | | | | PVV | |
| KL2B494 | GGNNIGSKSVH | 182 | DDSDRPS | 470 | QVWDSSSDH | 209 |
| | | | | | VV | |

TABLE 6
AbM HCDR1, HCDR2 and HCDR3 amino acid sequences of selected anti-hK2 antibodies.

| | | SEQ | | SEQ | | SEQ |
|---|---|---|---|---|---|---|
| | AbM HCDR1 | ID | AbM HCDR2 | ID | AbM HCDR3 | ID |
| Ab name | Sequence | NO | Sequence | NO | Sequence | NO |
| m11B6 | GNSITSDYA | 72 | YISYSGSTT | 73 | GYYYGSGF | 66 |
| | WN | | | | | |
| hu11B6 | GNSITSDYA | 72 | YISYSGSTT | 73 | GYYYGSGF | 66 |
| | WN | | | | | |
| HCF3- | GNSITSDYA | 72 | YISYSGSTT | 73 | GYYYGSGF | 66 |
| LCD6 | WN | | | | | |
| HCG5- | GNSITSDYA | 72 | YISYSGSTT | 73 | GYYYGSGF | 66 |
| LCB7 | WN | | | | | |
| KL2B357 | GNSITSDYA | 72 | YISYSGSTT | 73 | GYYYGSGF | 66 |
| | WN | | | | | |
| KL2B358 | GNSITSDYA | 72 | YISYSGSTT | 73 | GYYYGSGF | 66 |
| | WN | | | | | |
| KL2B359 | GNSITSDYA | 72 | YISYSGSTT | 73 | GYYYGSGF | 66 |
| | WN | | | | | |
| KL2B360 | GNSITSDYA | 72 | YISYSGSTT | 73 | GYYYGSGF | 66 |
| | WN | | | | | |
| KL2B413 | GFTFSSYWM | 147 | NIKQDGSER | 148 | DQNYDILTGHYGM | 143 |
| | T | | Y | | DV | |
| KL2B30 | GGSISSYYW | 194 | YIYYSGSTN | 195 | TTIFGVVTPNFYYG | 172 |
| | S | | | | MDV | |
| KL2B53 | GFTFSSYDIH | 196 | IISYDGSKK | 197 | ESGWSHYYYYGM | 178 |
| | | | D | | DV | |
| KL2B242 | GGSISSYYW | 198 | RLYVSGFTN | 199 | DSGNYWGWFDP | 184 |
| | S | | | | | |
| KL2B467 | GFTFSYY | 200 | FISYDGSNK | 201 | LPYSGSYWAFDY | 190 |
| | | | Y | | | |
| KL2B494 | GFTFSHYAM | 216 | TIGGSGGST | 217 | PHIVMVTALLYDG | 218 |
| | S | | YY | | MDV | |

TABLE 7
AbM LCDR1, LCDR2 and LCDR3 amino acid sequences of selected anti-hK2 antibodies.

| | | SEQ | | SEQ | | SEQ |
|---|---|---|---|---|---|---|
| | AbM LCDR1 | ID | AbM LCDR2 | ID | AbM LCDR3 | ID |
| Ab name | Sequence | NO | Sequence | NO | Sequence | NO |
| m11B6 | RASESVEYFGTSL | 67 | AASNVES | 69 | QQTRKVPYT | 71 |
| | MH | | | | | |
| hu11B6 | KASESVEYFGTSL | 68 | AASNRES | 70 | QQTRKVPYT | 71 |
| | MH | | | | | |
| HCF3- | KASESVEYFGTSL | 68 | AASNRES | 70 | QQTRKVPYT | 71 |
| LCD6 | MH | | | | | |
| HCG5- | KASESVEYFGTSL | 68 | AASNRES | 70 | QQTRKVPYT | 71 |
| LCB7 | MH | | | | | |
| KL2B357 | RASESVEYFGTSL | 67 | AASNVES | 69 | QQTRKVPYT | 71 |
| | MH | | | | | |
| KL2B358 | RASESVEYFGTSL | 67 | AASNVES | 69 | QQTRKVPYT | 71 |
| | MH | | | | | |
| KL2B359 | RASESVEYFGTSL | 67 | AASNVES | 69 | QQTRKVPYT | 71 |
| | MH | | | | | |
| KL2B360 | RASESVEYFGTSL | 67 | AASNVES | 69 | QQTRKVPYT | 71 |
| | MH | | | | | |
| KL2B413 | RASQGISSYLS | 144 | ATSTLQS | 145 | QQLNSYPRT | 146 |
| KL2B30 | RASQGISSYLA | 173 | AASTLQS | 174 | QQLNSYPLT | 175 |
| KL2B53 | RASQDISNYLA | 179 | AASTLHS | 180 | QKYNSAPYT | 181 |
| KL2B242 | SGDQLGENYAC | 185 | QDSKRPS | 186 | QAWDNSIVV | 187 |
| KL2B467 | GGDNIGSKSVH | 191 | DNSDRPS | 192 | QVWDSSSDHPV | 193 |
| | | | | | V | |
| KL2B494 | GGNNIGSKSVH | 182 | DDSDRPS | 470 | QVWDSSSDHV | 209 |
| | | | | | V | |

TABLE 8
Amino acid sequences and SEQ ID NO summary of the variable domains of selected anti-hK2
antibodies

| Antibody | | | SEQ ID |
|---|---|---|---|
| name | Region | Amino acid sequence | NO: |
| m11B6 | HCDR1 | SDYAWN | 63 |
| | HCDR2 | YISYSGSTTYSPSLKS | 64 |
| | HCDR3 | GYYYGSGF | 66 |
| | LICDR1 | RASESVEYFGTSLMH | 67 |
| | LCDR2 | AASNVES | 69 |
| | LCDR3 | QQTRKVPYT | 71 |
| | VH | DVQLQESGPGLVKPSQSLSLTCTVTGNSITSDYAWN | 125 |
| | (m11B6_VH) | WIRQFPGNRLEWMGYISYSGSTTYSPSLKSRFSITRD | |
| | | TSKNQFFLQLNSVTPEDTATYFCATGYYYGSGFWG | |
| | | QGTLVTVSS | |
| | VL | DIVLTQSPASLAVSLGQRATISCRASESVEYFGTSLM | 124 |
| | (m11B6_VL) | HWYRQKPGQPPKLLIYAASNVESGVPARFSGSGSG | |
| | | TDFSLNIQPVEEDDFSMYFCQQTRKVPYTFGGGTKL | |
| | | EIK | |
| h11B6 | HCDR1 | SDYAWN | 63 |
| | HCDR2 | YISYSGSTTYNPSLKS | 65 |
| | HCDR3 | GYYYGSGF | 66 |
| | LICDR1 | KASESVEYFGTSLMH | 68 |
| | LCDR2 | AASNRES | 70 |
| | LCDR3 | QQTRKVPYT | 71 |
| | VH | QVQLQESGPGLVKPSDTLSLTCAVSGNSITSDYAWN | 5 |
| | (hu11B6_VH) | WIRQPPGKGLEWIGYISYSGSTTYNPSLKSRVTMSR | |
| | | DTSKNQFSLKLSSVTAVDTAVYYCATGYYYGSGF | |
| | | WGQGTLVTVSS | |
| | VL | DIVLTQSPDSLAVSLGERATINCKASESVEYFGTSLM | 2 |
| | (hul1B6_VL) | HWYQQKPGQPPKLLIYAASNRESGVPDRFSGSGSG | |
| | | TDFTLTISSLQAEDVAVYYCQQTRKVPYTFGQGTKL | |
| | | EIK | |
| HCF3- | HCDR1 | SDYAWN | 63 |
| LCD6 | HCDR2 | YISYSGSTTYNPSLKS | 65 |
| | HCDR3 | GYYYGSGF | 66 |
| | LICDR1 | KASESVEYFGTSLMH | 68 |
| | LCDR2 | AASNRES | 70 |
| | LCDR3 | QQTRKVPYT | 71 |
| | VH | QVQLQESGPGLVKPSDTLSLTCAVSGNSITSDYAWN | 6 |
| | (HCF3_VH) | WIRQFPGKGLEWIGYISYSGSTTYNPSLKSRVTISRD | |
| | | TSKNQFSLKLSSVTPVDTAVYYCATGYYYGSGFWG | |
| | | QGTLVTVSS | |
| | VL | DIVLTQSPDSLAVSLGERATINCKASESVEYFGTSLM | 1 |
| | (LCD6_VL) | HWYQQKPGQPPKLLIYAASNRESGVPDRFSGSGSG | |
| | | TDFTLTIQSVQAEDVSVYFCQQTRKVPYTFGQGTKL | |
| | | EIK | |
| HCG5- | HCDR1 | SDYAWN | 63 |
| LCB7 | HCDR2 | YISYSGSTTYNPSLKS | 65 |
| | HCDR3 | GYYYGSGF | 66 |
| | LICDR1 | KASESVEYFGTSLMH | 68 |
| | LCDR2 | AASNRES | 70 |
| | LCDR3 | QQTRKVPYT | 71 |
| | VH | QVQLQESGPGLVKPSDTLSLTCAVSGNSITSDYAWN | 4 |
| | (HCG5_VH) | WIRQFPGKGLEWMGYISYSGSTTYNPSLKSRVTISR | |
| | | DTSKNQFSLKLSSVTPVDTAVYYCATGYYYGSGFW | |
| | | GQGTLVTVSS | |
| | VL | DIVLTQSPDSLAVSLGERATINCKASESVEYFGTSLM | 3 |
| | (LCB7_VL) | HWYQQKPGQPPKLLIYAASNRESGVPDRFSGSGSG | |
| | | TDFTLTISSVQAEDVAVYYCQQTRKVPYTFGQGTK | |
| | | LEIK | |
| KL2B357 | HCDR1 | SDYAWN | 63 |
| | HCDR2 | YISYSGSTTYNPSLKS | 65 |
| | HCDR3 | GYYYGSGF | 66 |
| | LICDR1 | RASESVEYFGTSLMH | 67 |
| | LCDR2 | AASNVES | 69 |
| | LCDR3 | QQTRKVPYT | 71 |
| | VH | QVQLQESGPGLVKPSQTLSLTCTVSGNSITSDYAWN | 159 |
| | (KL2B357_VH) | WIRQFPGKGLEWIGYISYSGSTTYNPSLKSRVTISRD | |
| | | TSKNQFSLKLSSVTAADTAVYYCATGYYYGSGFW | |
| | | GQGTLVTVSS | |
| | VL | DIVLTQSPDSLAVSLGERATINCRASESVEYFGTSLM | 160 |
| | (KL2B_357_VL) | HWYQQKPGQPPKLLIYAASNVESGVPDRFSGSGSG | |
| | | TDFTLTISSLQAEDVAVYFCQQTRKVPYTFGGGTKV | |
| | | EIK | |
| KL2B358 | HCDR1 | SDYAWN | 63 |
| | HCDR2 | YISYSGSTTYNPSLKS | 65 |
| | HCDR3 | GYYYGSGF | 66 |
| | LICDR1 | RASESVEYFGTSLMH | 67 |
| | LCDR2 | AASNVES | 69 |
| | LCDR3 | QQTRKVPYT | 71 |
| | VH | QVQLQESGPGLVKPSQTLSLTCTVSGNSITSDYAWN | 161 |
| | (KL2B358_VH) | WIRQPPGKGLEWIGYISYSGSTTYNPSLKSRVTISRD | |
| | | TSKNQFSLKLSSVTAADTAVYYCATGYYYGSGFW | |
| | | GQGTLVTVSS | |
| | VL | EIVLTQSPATLSLSPGERATLSCRASESVEYFGTSLM | 140 |
| | (KL2B_358_VL) | HWYQQKPGQPPRLLIYAASNVESGIPARFSGSGSGT | |
| | | DFTLTISSVEPEDFAVYFCQQTRKVPYTFGGGTKVEI | |
| | | K | |
| KL2B359 | HCDR1 | SDYAWN | 63 |
| | HCDR2 | YISYSGSTTYNPSLKS | 65 |
| | HCDR3 | GYYYGSGF | 66 |
| | LICDR1 | RASESVEYFGTSLMH | 67 |
| | LCDR2 | AASNVES | 69 |
| | LCDR3 | QQTRKVPYT | 71 |
| | VH | QVQLQESGPGLVKPSQTLSLTCTVSGNSITSDYAWN | 139 |
| | (KL2B359_VH) | WIRQFPGKRLEWIGYISYSGSTTYNPSLKSRVTISRD | |
| | | TSKNQFSLKLSSVTAADTAVYYCATGYYYGSGFW | |
| | | GQGTLVTVSS | |
| | VL | EIVLTQSPATLSLSPGERATLSCRASESVEYFGTSLM | 140 |
| | (KL2B_359_VL) | HWYQQKPGQPPRLLIYAASNVESGIPARFSGSGSGT | |
| | | DFTLTISSVEPEDFAVYFCQQTRKVPYTFGGGTKVEI | |
| | | K | |
| KL2B360 | HCDR1 | SDYAWN | 63 |
| | HCDR2 | YISYSGSTTYNPSLKS | 65 |
| | HCDR3 | GYYYGSGF | 66 |
| | LICDR1 | RASESVEYFGTSLMH | 67 |
| | LCDR2 | AASNVES | 69 |
| | LCDR3 | QQTRKVPYT | 71 |
| | VH | QVQLQESGPGLVKPSQTLSLTCTVSGNSITSDYAWN | 159 |
| | (KL2B360_VH) | WIRQFPGKGLEWIGYISYSGSTTYNPSLKSRVTISRD | |
| | | TSKNQFSLKLSSVTAADTAVYYCATGYYYGSGFW | |
| | | GQGTLVTVSS | |
| | VL | EIVLTQSPATLSLSPGERATLSCRASESVEYFGTSLM | 140 |
| | (KL2B_360_VL) | HWYQQKPGQPPRLLIYAASNVESGIPARFSGSGSGT | |
| | | DFTLTISSVEPEDFAVYFCQQTRKVPYTFGGGTKVEI | |
| | | K | |
| KL2B413 | HCDR1 | SYWMT | 141 |
| | HCDR2 | NIKQDGSERYYVDSVKG | 142 |
| | HCDR3 | DQNYDILTGHYGMDV | 143 |
| | LICDR1 | RASQGISSYLS | 144 |
| | LCDR2 | ATSTLQS | 145 |
| | LCDR3 | QQLNSYPRT | 146 |
| | VH | EVQLVESGGGLVQPGGSLRLSCAASGFTFSSYWMT | 137 |
| | (KL2B413_VH) | WVRQAPGKGLEWVANIKQDGSERYYVDSVKGRFT | |
| | | ISRDNAKNSLYLQMNSLRAEDTAVYYCARDQNYDI | |
| | | LTGHYGMDVWGQGTTVTVSS | |
| | VL | EIVLTQSPSFLSASVGDRVTITCRASQGISSYLSWYQ | 138 |
| | (KL2B_413_VL) | QKPGKAPKLLIYATSTLQSGVPSRFSGSGSGTEFTLT | |
| | | ISSLQPEDFATYYCQQLNSYPRTFGQGTKVEIK | |
| KL2B30 | HCDR1 | SYYWS | 170 |
| | HCDR2 | YIYYSGSTNYNPSLKS | 171 |
| | HCDR3 | TTIFGVVTPNFYYGMDV | 172 |
| | LICDR1 | RASQGISSYLA | 173 |
| | LCDR2 | AASTLQS | 174 |
| | LCDR3 | QQLNSYPLT | 175 |
| | VH | QVQLQESGPGLVKPSETLSLTCTVSGGSISSYYWSW | 162 |
| | (KL2B30_VH) | IRQPPGKGLEWIGYIYYSGSTNYNPSLKSRVTISVDT | |
| | | SKNQFSLKLSSVTAADTAVYYCAGTTIFGVVTPNFY | |
| | | YGMDVWGQGTTVTVSS | |
| | VL | DIQMTQSPSFLSASVGDRVTITCRASQGISSYLAWY | 163 |
| | (KL2B30_VL) | QQKPGKAPKFLIYAASTLQSGVPSRFSGSGSGTEFTL | |
| | | TISSLQPEDFATYYCQQLNSYPLTFGGGTKVEIK | |
| KL2B53 | HCDR1 | SYDIH | 176 |
| | HCDR2 | IISYDGSKKDYTDSVKG | 177 |
| | HCDR3 | ESGWSHYYYYGMDV | 178 |
| | LICDR1 | RASQDISNYLA | 179 |
| | LCDR2 | AASTLHS | 180 |
| | LCDR3 | QKYNSAPYT | 181 |
| | VH | EVQLVESGGGVVQPGRSLRLSCVASGFTFSSYDIHW | 164 |
| | (KL2B53_VH) | VRQAPGKGLEWVAIISYDGSKKDYTDSVKGRFTISR | |
| | | DNSKNTLYLQMDSLRVED | |
| | | SAVYSCARESGWSHYYYYGMDVWGQGTMVTVSS | |
| | VL | DIVMTQSPSSLSASVGDRVTITCRASQDISNYLAWY | 165 |
| | (KL2B53_VL) | QQKPGKVPKFLIYAASTLHSGVPSRFSGSGSGTDFT | |
| | | LTISSLQPEDVATYYCQKYNSAPYTFGQGTRLEIK | |
| KL2B242 | HCDR1 | SYYWS | 170 |
| | HCDR2 | RLYVSGFTNYNPSLKS | 183 |
| | HCDR3 | DSGNYWGWFDP | 184 |
| | LICDR1 | SGDQLGENYAC | 185 |
| | LCDR2 | QDSKRPS | 186 |
| | LCDR3 | QAWDNSIVV | 187 |
| | VH | QVQLQESGPGLVKPSETLSLTCTVSGGSISSYYWSW | 166 |
| | (KL2B242_VH) | LRQPAGSGLEWIGRLYVSGFTNYNPSLKSRVTLSLD | |
| | | PSRNQLSLKLSSVTAADTAVYYCAGDSGNYWGWF | |
| | | DPWGQGTLVTVSS | |
| | VL | SYELTQPPSVSVSPGETASITCSGDQLGENYACWYQ | 167 |
| | (KL2B242_VL) | QKPGQSPVLVIYQDSKRPSGIPERFSGSNSGNTATLT | |
| | | ISGTQALDEADYYCQAWDNSIVVFGGGTKLTVL | |
| KL2B467 | HCDR1 | YYGMH | 188 |
| | HCDR2 | FISYDGSNKYYADSVKG | 189 |
| | HCDR3 | LPYSGSYWAFDY | 190 |
| | LICDR1 | GGDNIGSKSVH | 191 |
| | LCDR2 | DNSDRPS | 192 |
| | LCDR3 | QVWDSSSDHPVV | 193 |
| | VH | QVQLVESGGGVVQPGRSLRLSCAASGFTFSYYGMH | 168 |
| | (KL2B467_VH) | WVRQAPGKGLEWVAFISYDGSNKYYADSVKGRFTI | |
| | | SRDNSKNTLYLQMNSLRAEDTAVYYCAHLPYSGSY | |
| | | WAFDYWGQGTQVTVSS | |
| | VL | QSVLTQPPSVSVAPGQTASITCGGDNIGSKSVHWYQ | 169 |
| | (KL2B467_VL) | QKPGQAPVLVVYDNSDRPSGIPERFSGSNSGTTATL | |
| | | TISRVEAGDEADYYCQVWDSSSDHPVVFGGGTKVT | |
| | | V | |
| KL2B494 | HCDR1 | HYAMS | 206 |
| | HCDR2 | TIGGSGGSTYYADSVKG | 207 |
| | HCDR3 | PHIVMVTALLYDGMDV | 208 |
| | LCDR1 | GGNNIGSKSVH | 182 |
| | LCDR2 | DDSDRPS | 470 |
| | LCDR3 | QVWDSSSDHVV | 209 |
| | VH | QVQLVESGGGLVQPGGSLRLSCAASGFTFSHYAMS | 204 |
| | (KL2B494_VH) | WVRQAPGKGLEWVSTIGGSGGSTYYADSVKGRFTI | |
| | | SRDNSKNTLYLQMNSLRAEDTAVYYCAKPHIVMV | |
| | | TALLYDGMDVWGQGTMVTVSS | |
| | VL | SSELTQPPSVSVAPGQTARITCGGNNIGSKSVHWYQ | 205 |
| | (KL2B494_VL) | QKPGQAPVLVVYDDSDRPSGIPERFSGSNSGNTATL | |
| | | TISRVEAGDEADYYCQVWDSSSDHVVFGGGTKLTV | |
| | | L | |

TABLE 9
SEQ ID NO of Protein and DNA sequences of the
VH and VL domains of selected hK2 antibodies.

| | VH | VL | VH | VL |
|---|---|---|---|---|
| | Protein | Protein | cDNA | cDNA |
| | SEQ ID | SEQ | SEQ ID | SEQ ID |
| Antibody | NO: | ID NO | NO: | NO: |
| m11B6 | 125 | 124 | 225 | 237 |
| hu11B6 | 5 | 2 | 226 | 238 |
| HCF3-LCD6 | 6 | 1 | 227 | 239 |
| HCG5-LCB7 | 4 | 3 | 228 | 240 |
| KL2B357 | 159 | 160 | 229 | 241 |
| KL2B358 | 161 | 140 | 230 | 242 |
| KL2B359 | 139 | 140 | 231 | 242 |
| KL2B360 | 159 | 140 | 229 | 242 |
| KL2B413 | 137 | 138 | 232 | 243 |
| KL2B30 | 162 | 163 | 233 | 244 |
| KL2B53 | 164 | 165 | 234 | 245 |
| KL2B242 | 166 | 167 | 235 | 246 |
| KL2B467 | 168 | 169 | 236 | 247 |
| KL2B494 | 204 | 205 | 263 | 271 |

(m11B6 VH cDNA)
SEQ ID NO: 225
GATGTGCAGCTTCAGGAGTCTGGACCCGGACTTGTTAAACCAAGTCAGTCTCTGTCCCTGAC
CTGTACCGTCACCGGCAACAGCATCACAAGCGATTACGCATGGAACTGGATCAGGCAGTTCC
CTGGAAATCGACTCGAATGGATGGGCTACATTTCATACTCCGGTTCAACCACTTACTCTCCAT
CCTTGAAATCTAGGTTCAGCATCACCCGTGATACCTCAAAGAACCAATTTTTTCTGCAACTG
AATAGCGTAACTCCAGAGGACACAGCCACATATTTCTGCGCCACTGGGTATTACTATGGCTC
AGGTTTCTGGGGTCAGGGCACTCTCGTCACCGTCAGCAGC
(hu11B6 VH cDNA)
SEQ ID NO: 226
CAGGTCCAACTGCAAGAGAGCGGACCGGGCCTGGTAAAGCCATCCGACACATTGTCCCTGA
CGTGTGCGGTAAGTGGAAACTCTATCACTAGCGACTATGCGTGGAATTGGATAAGACAACC
GCCGGGCAAGGGGCTGGAATGGATAGGATATATCAGCTATTCCGGTTCTACGACATACAATC
CTTCCCTGAAAAGCAGAGTCACTATGTCACGCGACACGTCCAAGAATCAGTTCTCATTGAAA
TTGTCATCCGTAACGGCCGTTGACACTGCGGTTTATTATTGCGCAACCGGATATTACTACGGC
TCTGGTTTTTGGGGACAGGGAACACTTGTTACTGTTAGTTCA
(HCF3-LCD6 VH cDNA)
SEQ ID:NO 227
CAGGTGCAGCTGCAGGAGAGCGGCCCAGGCCTGGTGAAGCCAAGCGACACCCTGAGCCTGA
CCTGCGCCGTGAGCGGCAACAGCATCACCAGCGACTACGCCTGGAACTGGATCCGCCAGTTC
CCAGGCAAGGGCCTGGAGTGGATCGGCTACATCAGCTACAGCGGCAGCACCACCTACAACC
CAAGCCTGAAGAGCCGCGTCACCATCAGCCGCGACACCAGCAAGAACCAGTTCAGCCTGAA
GCTGAGCAGCGTGACCCCTGTGGACACCGCCGTGTACTACTGCGCCACCGGCTACTACTACG
GCAGCGGCTTCTGGGGCCAGGGCACCCTGGTGACCGTGAGCAGC
(HCG5-LCB7 VH cDNA)
SEQ ID NO: 228
CAGGTGCAGCTGCAGGAGAGCGGCCCAGGCCTGGTGAAGCCAAGCGACACCCTGAGCCTGA
CCTGCGCCGTGAGCGGCAACAGCATCACCAGCGACTACGCCTGGAACTGGATCCGCCAGTTC
CCAGGCAAGGGCCTGGAGTGGATGGGCTACATCAGCTACAGCGGCAGCACCACCTACAACC
CAAGCCTGAAGAGCCGCGTCACCATCAGCCGCGACACCAGCAAGAACCAGTTCAGCCTGAA
GCTGAGCAGCGTGACCCCTGTGGACACCGCCGTGTACTACTGCGCCACCGGCTACTACTACG
GCAGCGGCTTCTGGGGCCAGGGCACCCTGGTGACCGTGAGCAGC
(KL2B357, KL2B360 VH cDNA)
SEQ ID NO: 229
CAGGTTCAGCTGCAAGAGTCTGGACCAGGCCTGGTCAAGCCCTCTCAGACCCTGTCTCTGAC
CTGTACCGTGTCCGGCAACTCCATCACCTCTGACTACGCCTGGAACTGGATTCGGCAGTTCC
CTGGCAAGGGCCTTGAGTGGATCGGCTACATCTCCTACTCCGGTTCCACCACCTACAACCCC
AGCCTGAAGTCCCGGGTCACCATCTCCCGCGACACCTCCAAGAACCAGTTCTCCCTGAAGCT
GTCCTCCGTGACCGCTGCTGATACCGCCGTGTACTACTGTGCCACCGGCTACTACTACGGCTC
CGGCTTTTGGGGACAGGGCACACTGGTTACCGTGTCTAGT
(KL2B358 VH cDNA)
SEQ ID NO: 230
CAGGTTCAGCTGCAAGAGTCTGGACCAGGCCTGGTCAAGCCCTCTCAGACCCTGTCTCTGAC
CTGTACCGTGTCCGGCAACTCCATCACCTCTGACTACGCCTGGAACTGGATTCGGCAGCCAC
CTGGCAAGGGCCTTGAGTGGATCGGCTACATCTCCTACTCCGGTTCCACCACCTACAACCCC
AGCCTGAAGTCCCGGGTCACCATCTCCCGCGACACCTCCAAGAACCAGTTCTCCCTGAAGCT
GTCCTCCGTGACCGCTGCTGATACCGCCGTGTACTACTGTGCCACCGGCTACTACTACGGCTC
CGGCTTTTGGGGACAGGGCACACTGGTTACCGTGTCTAGT
(KL2B359 VH cDNA)
SEQ ID NO: 231
CAGGTTCAGCTGCAAGAGTCTGGACCAGGCCTGGTCAAGCCCTCTCAGACCCTGTCTCTGAC
CTGTACCGTGTCCGGCAACTCCATCACCTCTGACTACGCCTGGAACTGGATTCGGCAGTTCC
CTGGCAAGCGCCTTGAGTGGATCGGCTACATCTCCTACTCCGGTTCCACCACCTACAACCCC
AGCCTGAAGTCCCGGGTCACCATCTCCCGCGACACCTCCAAGAACCAGTTCTCCCTGAAGCT
GTCCTCCGTGACCGCTGCTGATACCGCCGTGTACTACTGTGCCACCGGCTACTACTACGGCTC
CGGCTTTTGGGGACAGGGCACACTGGTTACCGTGTCTAGT
(KL2B413 VH cDNA)
SEQ ID NO: 232
GAGGTGCAACTTGTGGAGAGCGGCGGAGGTCTGGTCCAACCCGGAGGAAGTCTCCGTCTCT
CCTGTGCTGCTAGTGGCTTCACTTTCAGCTCATATTGGATGACATGGGTGAGACAAGCCCCA
GGAAAGGGGCTCGAGTGGGTAGCTAACATTAAACAGGACGGCTCCGAACGGTACTATGTTG
ATTCTGTGAAGGGACGGTTCACTATATCCAGGGATAATGCAAAAAATTCACTCTATCTTCAA
ATGAACTCACTCAGAGCAGAGGACACTGCCGTGTATTATTGCGCCAGGGATCAAAATTATGA
CATACTGACCGGTCATTATGGAATGGATGTTTGGGGCCAGGGAACAACCGTTACCGTCTCAA
GT
(KL2B30 VH cDNA)
SEQ ID NO: 233
CAGGTGCAGCTGCAGGAGTCGGGCCCAGGACTGGTGAAGCCTTCGGAGACCCTGTCCCTCA
CCTGCACTGTCTCTGGTGGCTCCATCAGTAGTTACTACTGGAGCTGGATCCGGCAGCCCCCA
GGGAAGGGACTGGAGTGGATTGGATATATCTATTACAGTGGGAGCACCAACTACAACCCCT
CCCTCAAGAGTCGAGTCACCATATCAGTAGACACGTCCAAGAACCAGTTCTCCCTGAAGCTG
AGCTCTGTGACCGCTGCGGACACGGCCGTGTATTACTGTGCGGGGACTACGATTTTTGGAGT
GGTTACCCCCAACTTCTACTACGGTATGGACGTCTGGGGCCAAGGGACCACGGTCACCGTCT
CCTCA
(KL2B53 VH cDNA)
SEQ ID NO: 234
GAGGTGCAGCTGGTGGAGTCTGGGGGAGGCGTGGTCCAGCCTGGGAGGTCCCTGAGACTCT
CCTGTGTAGCCTCTGGATTCACCTTCAGTAGTTATGACATACACTGGGTCCGCCAGGCTCCA
GGCAAGGGGCTGGAGTGGGTGGCAATTATTTCATATGATGGAAGTAAAAAAGACTATACAG
ACTCCGTGAAGGGCCGATTCACCATCTCCAGAGACAATTCCAAGAACACGCTGTATCTGCAA
ATGGACAGCCTGAGAGTTGAGGACTCGGCTGTGTATTCCTGTGCGAGAGAAAGTGGCTGGTC
CCACTACTACTATTACGGTATGGACGTCTGGGGCCAAGGGACAATGGTCACCGTCTCTTCA
(KL2B242 VH cDNA)
SEQ ID NO: 235
CAGGTGCAGCTGCAGGAGTCGGGCCCAGGACTGGTGAAGCCTTCGGAGACCCTGTCCCTCA
CCTGCACTGTCTCTGGTGGCTCCATCAGTAGTTACTATTGGAGCTGGCTCCGGCAGCCCGCC
GGGTCGGGACTGGAGTGGATTGGGCGTTTATATGTCAGTGGGTTCACCAACTACAACCCCTC
CCTCAAGAGTCGAGTCACCTTGTCACTAGACCCGTCCAGGAACCAGTTGTCCCTGAAACTGA
GTTCTGTGACCGCCGCGGACACGGCCGTATATTATTGTGCGGGAGATAGTGGGAACTACTGG
GGTTGGTTCGACCCCTGGGGCCAGGGAACCCTGGTCACCGTCTCCTCA
(KL2B467 VH cDNA)
SEQ ID NO: 236
CAGGTGCAGCTGGTGGAGTCTGGGGGAGGCGTGGTCCAGCCTGGGAGGTCCCTGAGACTCT
CCTGTGCAGCCTCTGGATTCACCTTCAGTTACTATGGCATGCACTGGGTCCGCCAGGCTCCA
GGCAAGGGGCTGGAGTGGGTGGCATTTATATCATATGATGGAAGTAATAAATACTATGCAG
ACTCCGTGAAGGGCCGATTCACCATCTCCAGAGACAATTCCAAGAACACGCTGTATCTGCAA
ATGAACAGCCTGAGAGCTGAGGACACGGCTGTGTATTACTGTGCCCACCTCCCTTATAGTGG
GAGCTACTGGGCCTTTGACTACTGGGGCCAGGGAACCCAGGTCACCGTCTCTTCA
(KL2B494 VH cDNA)
SEQ ID NO: 263
CAGGTGCAGCTGGTGGAGTCTGGGGGAGGCTTGGTACAGCCTGGGGGGTCCCTGAGACTCT
CCTGTGCAGCCTCTGGATTCACCTTTAGTCATTATGCCATGAGCTGGGTCCGCCAGGCTCCAG
GGAAGGGGCTGGAGTGGGTCTCAACTATTGGTGGTAGTGGTGGTAGCACATACTACGCAGA
CTCCGTGAAGGGCCGGTTCACCATCTCCAGAGACAATTCCAAGAACACGCTGTATCTGCAAA
TGAACAGCCTGAGAGCCGAGGACACGGCCGTATATTACTGTGCGAAACCTCATATTGTAATG
GTGACTGCTCTTCTCTACGACGGTATGGACGTCTGGGGCCAAGGGACAATGGTCACCGTCTC
CTCA
(m11B6 VL cDNA)
SEQ ID NO: 237
GACATTGTGCTGACACAGAGTCCAGCATCCTTGGCAGTATCTTTGGGGCAGCGGGCAACAAT
TTCATGCCGTGCATCTGAAAGTGTGGAGTATTTTGGAACTTCTCTTATGCACTGGTATCGCCA
GAAGCCTGGGCAGCCTCCCAAACTCCTTATATATGCCGCTTCCAACGTGGAGTCCGGAGTAC
CAGCACGCTTTTCCGGCTCTGGGTCCGGCACAGACTTTTCCCTCAATATCCAACCTGTTGAAG
AAGACGATTTTTCCATGTATTTTTGCCAACAGACACGCAAGGTTCCATATACATTCGGCGGC
GGCACTAAACTTGAGATCAAA
(hu11B6 VL cDNA)
SEQ ID NO: 238
GACATAGTCTTGACTCAGAGCCCGGATTCCCTTGCTGTGTCTCTGGGAGAACGAGCTACGAT
CAACTGCAAGGCAAGTGAATCCGTAGAATACTTCGGGACATCATTGATGCATTGGTATCAAC
AGAAACCGGGGCAACCGCCCAAATTGCTGATATATGCGGCTAGTAATAGAGAATCAGGAGT
ACCGGATAGGTTTAGTGGTTCAGGATCAGGTACAGATTTCACCCTGACAATAAGTAGCTTGC
AAGCCGAAGACGTAGCAGTGTATTACTGCCAACAAACCCGAAAGGTGCCATATACGTTTGG
ACAGGGTACAAAGTTGGAAATCAAA
(HCF3-LCD6 VL cDNA)
SEQ ID NO: 239
GACATCGTGCTGACCCAGAGCCCAGACAGCCTGGCCGTGAGCCTGGGCGAGCGCGCCACCA
TCAACTGCAAGGCCAGCGAGAGCGTGGAGTACTTCGGCACCAGCCTGATGCACTGGTACCA
GCAGAAGCCAGGCCAGCCACCAAAGCTGCTGATCTACGCTGCCAGCAACCGCGAGAGCGGC
GTGCCAGACCGCTTCAGCGGCAGCGGCAGCGGCACCGACTTCACCCTGACCATCCAGAGCG
TGCAGGCCGAGGACGTCTCCGTGTACTTCTGCCAGCAGACCCGCAAGGTGCCATACACCTTC
GGCCAGGGCACCAAGCTGGAGATCAAG
(HCG5-LCB7 VL cDNA)
SEQ ID NO: 240
GACATCGTGCTGACCCAGAGCCCAGACAGCCTGGCCGTGAGCCTGGGCGAGCGCGCCACCA
TCAACTGCAAGGCCAGCGAGAGCGTGGAGTACTTCGGCACCAGCCTGATGCACTGGTACCA
GCAGAAGCCAGGCCAGCCACCAAAGCTGCTGATCTACGCTGCCAGCAACCGCGAGAGCGGC
GTGCCAGACCGCTTCAGCGGCAGCGGCAGCGGCACCGACTTCACCCTGACCATCAGCAGCG
TGCAGGCCGAGGACGTCGCCGTGTACTACTGCCAGCAGACCCGCAAGGTGCCATACACCTTC
GGCCAGGGCACCAAGCTGGAGATCAAG
(KL2B357 VL cDNA)
SEQ ID NO: 241
GACATCGTGCTGACCCAGTCTCCAGACTCTCTGGCTGTGTCTCTGGGCGAGAGAGCCACCAT
CAACTGCAGAGCCTCCGAGTCCGTGGAATACTTCGGCACCTCTCTGATGCACTGGTACCAGC
AGAAGCCCGGCCAGCCTCCTAAGCTGCTGATCTACGCCGCCTCCAACGTGGAATCTGGCGTG
CCCGATAGATTTTCCGGCTCTGGCTCTGGCACCGACTTTACCCTGACCATCAGCTCTCTGCAG
GCCGAGGATGTGGCCGTGTACTTCTGTCAGCAGACCCGGAAGGTGCCCTACACATTTGGCGG
CGGAACAAAGGTGGAAATCAAG
(KL2B358, KL2B359, KL2B360 VL cDNA)
SEQ ID NO: 242
GAGATCGTGCTGACCCAGTCTCCTGCCACACTGTCACTGTCTCCAGGCGAGAGAGCCACCCT
CTCTTGTAGAGCCTCCGAGTCCGTGGAATACTTCGGCACCTCTCTGATGCACTGGTACCAGC
AGAAGCCCGGCCAGCCTCCTAGACTGCTGATCTACGCCGCCTCCAACGTCGAATCTGGCATC
CCCGCTAGATTCTCCGGCTCTGGCTCTGGCACAGACTTTACCCTGACCATCTCCTCCGTGGAA
CCCGAGGATTTCGCTGTGTACTTTTGCCAGCAGACCCGGAAGGTGCCCTACACATTTGGCGG
CGGAACAAAGGTGGAAATCAAG
(KL2B413 VL cDNA)
SEQ ID NO: 243
GAAATCGTACTGACCCAGTCCCCTTCTTTCTTGAGTGCATCAGTTGGGGATAGAGTGACCAT
TACTTGTAGAGCATCTCAAGGTATTTCTTCATACTTGTCTTGGTATCAACAAAAACCTGGCAA
GGCACCCAAACTCTTGATCTACGCCACCTCTACATTGCAAAGTGGGGTTCCTTCTAGGTTTTC
AGGCTCCGGCTCTGGTACCGAGTTCACCCTCACTATAAGCAGTCTCCAACCTGAAGATTTCG
CTACTTATTATTGTCAGCAGCTTAATTCTTATCCCCGAACCTTTGGTCAAGGAACTAAGGTCG
AGATCAAA
(KL2B30 VL cDNA)
SEQ ID NO: 244
GACATCCAGATGACCCAGTCTCCTTCCTTCCTGTCTGCATCTGTAGGAGACAGAGTCACCAT
CACTTGCCGGGCCAGTCAGGGCATTAGCAGTTATTTAGCCTGGTATCAGCAAAAACCAGGGA
AAGCCCCTAAGTTCCTGATCTATGCTGCATCCACTTTGCAAAGTGGGGTCCCATCAAGGTTC
AGCGGCAGTGGATCTGGGACAGAATTCACTCTCACAATCAGCAGCCTGCAGCCTGAAGATTT
TGCAACTTATTACTGTCAACAGCTTAATAGTTACCCTCTCACTTTCGGCGGAGGGACCAAGG
TGGAAATCAAA
(KL2B53 VL cDNA)
SEQ ID NO: 245
GACATCGTGATGACCCAGTCTCCATCCTCCCTGTCTGCATCTGTAGGAGACAGAGTCACCAT
CACTTGCCGGGCGAGTCAGGACATTAGCAATTATTTAGCCTGGTATCAGCAGAAACCAGGG
AAAGTTCCTAAGTTCCTGATCTATGCTGCATCCACTTTGCACTCTGGGGTCCCATCTCGGTTC
AGTGGCAGTGGATCTGGGACAGATTTCACTCTCACCATCAGCAGCCTGCAGCCTGAAGATGT
TGCAACTTATTACTGTCAAAAGTATAACAGTGCCCCGTACACTTTTGGCCAAGGGACACGAC
TGGAGATTAAA
(KL2B242 VL cDNA)
SEQ ID NO: 246
TCCTATGAGCTGACTCAGCCACCCTCAGTGTCCGTGTCCCCAGGAGAGACAGCCAGCATCAC
CTGCTCTGGAGATCAATTGGGGGAAAATTATGCTTGCTGGTATCAGCAGAAGCCAGGCCAGT
CCCCTGTGTTGGTCATCTATCAAGATAGTAAGCGGCCCTCAGGGATCCCTGAGCGATTCTCT
GGCTCCAACTCTGGGAACACAGCCACTCTGACCATCAGCGGGACCCAGGCTCTGGATGAGG
CTGACTATTACTGTCAGGCGTGGGACAACAGTATTGTGGTATTCGGCGGAGGGACCAAGCTG
ACCGTCCTA
(KL2B467 VL cDNA)
SEQ ID NO: 247
CAGTCTGTGCTGACTCAGCCACCCTCGGTGTCAGTGGCCCCCGGGCAGACGGCCAGTATTAC
CTGTGGGGGAGACAACATTGGAAGTAAAAGTGTGCACTGGTACCAGCAGAAGCCAGGCCAG
GCCCCTGTGCTGGTCGTCTATGATAATAGCGACCGGCCCTCAGGGATCCCTGAGCGATTCTC
TGGCTCCAACTCTGGGACCACGGCCACCCTGACCATCAGCAGGGTCGAAGCCGGGGATGAG
GCCGACTATTACTGTCAGGTGTGGGATAGTAGTAGTGATCATCCTGTGGTATTCGGCGGAGG
GACCAAGGTCACCGTCCTA
(KLK2B494_VL DNA)
SEQ ID: 271
TCTTCTGAGCTGACTCAGCCACCCTCGGTGTCAGTGGCCCCAGGACAGACGGCCAGGATTAC
CTGTGGGGGAAACAACATTGGAAGTAAAAGTGTGCACTGGTACCAGCAGAAGCCAGGCCAG
GCCCCTGTGCTGGTCGTCTATGATGATAGCGACCGGCCCTCAGGGATCCCTGAGCGATTCTC
TGGCTCCAACTCTGGGAACACGGCCACCCTGACCATCAGCAGGGTCGAAGCCGGGGATGAG
GCCGACTATTACTGTCAGGTGTGGGATAGTAGTAGTGATCATGTGGTATTCGGCGGAGGGAC
CAAGCTGACCGTCCTA

Fab-Fc and scFvs

[0763] The hK2 specific VH/VL regions were engineered as VH -CH1-hinge CH₂ —CH₃ and VL -CL and expressed as IgG2 or IgG4 or were engineered as scFvs in either the VH-Linker-VL or VL-linker-VH orientations. The linker that is used in the scFv was the linker of SEQ ID NO: 7 described above. The scFv were used to generate bispecific antibodies as described in Example 7 or to generated CAR as described in Example 11.

[0764] Table 10 shows the HC amino acid sequences of selected anti-hK2 antibodies in the mAb format. Table 11 shows the LC amino acid sequences of selected anti-hK2 antibodies in a mAb. Table 12 summaries the HC and LC DNA SEQ ID NOs of selected anti-hK2 antibodies in the mAb format. Table 13 shows the amino acid sequences of selected scFvs in VH-linker-VL or VL-linker-VH orientation.

TABLE 10
Amino acid sequence of the HC (VH-CH1-hinge CH2-CH3) of selected anti-hK2
antibodies in a mAb format.

| | HC | |
|---|---|---|
| HK2 | PROTEIN | |
| HEAVY | SEQ ID | |
| CHAIN | NO: | HC AMINO ACID SEQUENCE |
| m11B6_HC | 202 | DVQLQESGPGLVKPSQSLSLTCTVTGNSITSDYAWNWIRQFP |
| | | GNRLEWMGYISYSGSTTYSPSLKSRFSITRDTSKNQFFLQLNS |
| | | VTPEDTATYFCATGYYYGSGFWGQGTLVTVSSAKTTAPSVY |
| | | PLAPVCGDTTGSSVTLGCLVKGYFPEPVTLTWNSGSLSSGVH |
| | | TFPAVLQSDLYTLSSSVTVTSSTWPSQSITCNVAHPASSTKVD |
| | | KKIEPRGPTIKPCPPCKCPAPNLLGGPSVFIFPPKIKDVLMISLS |
| | | PIVTCVVVDVSEDDPDVQISWFVNNVEVHTAQTQTHREDYN |
| | | STLRVVSALPIQHQDWMSGKEFKCKVNNKDLPAPIERTISKP |
| | | KGSVRAPQVYVLPPPEEEMTKKQVTLTCMVTDFMPEDIYVE |
| | | WTNNGKTELNYKNTEPVLDSDGSYFMYSKLRVEKKNWVER |
| | | NSYSCSVVHEGLHNHHTTKSFSRTPGK |
| h11B6_HC | 203 | QVQLQESGPGLVKPSDTLSLTCAVSGNSITSDYAWNWIRQPP |
| | | GKGLEWIGYISYSGSTTYNPSLKSRVTMSRDTSKNQFSLKLSS |
| | | VTAVDTAVYYCATGYYYGSGFWGQGTLVTVSSASTKGPSV |
| | | FPLAPSSKSTSGGTAALGCLVKDYFPEPVTVSWNSGALTSGV |
| | | HTFPAVLQSSGLYSLSSVVTVPSSSLGTQTYICNVNHKPSNTK |
| | | VDKKVEPKSCDKTHTCPPCPAPELLGGPSVFLFPPKPKDTLMI |
| | | SRTPEVTCVVVDVSHEDPEVKFNWYVDGVEVHNAKTKPRE |
| | | EQYNSTYRVVSVLTVLHQDWLNGKEYKCKVSNKALPAPIEK |
| | | TISKAKGQPREPQVYTLPPSREEMTKNQVSLTCLVKGFYPSDI |
| | | AVEWESNGQPENNYKTTPPVLDSDGSFFLYSKLTVDKSRWQ |
| | | QGNVFSCSVMHEALHNHYTQKSLSLSPGK |
| KL2B30_HC | 210 | QVQLQESGPGLVKPSETLSLTCTVSGGSISSYYWSWIRQPPGK |
| | | GLEWIGYIYYSGSTNYNPSLKSRVTISVDTSKNQFSLKLSSVT |
| | | AADTAVYYCAGTTIFGVVTPNFYYGMDVWGQGTTVTVSSA |
| | | STKGPSVFPLAPCSRSTSESTAALGCLVKDYFPEPVTVSWNSG |
| | | ALTSGVHTFPAVLQSSGLYSLSSVVTVPSSSLGTKTYTCNVD |
| | | HKPSNTKVDKRVESKYGPPCPPCPAPEAAGGPSVFLFPPKPK |
| | | DTLMISRTPEVTCVVVDVSQEDPEVQFNWYVDGVEVHNAK |
| | | TKPREEQFNSTYRVVSVLTVLHQDWLNGKEYKCKVSNKGLP |
| | | SSIEKTISKAKGQPREPQVYTLPPSQEEMTKNQVSLTCLVKGF |
| | | YPSDIAVEWESNGQPENNYKTTPPVLDSDGSFFLYSRLTVDK |
| | | SRWQEGNVFSCSVMHEALHNHYTQKSLSLSLGK |
| K2B53_HC | 211 | EVQLVESGGGVVQPGRSLRLSCVASGFTFSSYDIHWVRQAPG |
| | | KGLEWVAIISYDGSKKDYTDSVKGRFTISRDNSKNTLYLQM |
| | | DSLRVEDSAVYSCARESGWSHYYYYGMDVWGQGTMVTVS |
| | | SASTKGPSVFPLAPCSRSTSESTAALGCLVKDYFPEPVTVSWN |
| | | SGALTSGVHTFPAVLQSSGLYSLSSVVTVPSSSLGTKTYTCNV |
| | | DHKPSNTKVDKRVESKYGPPCPPCPAPEAAGGPSVFLFPPKP |
| | | KDTLMISRTPEVTCVVVDVSQEDPEVQFNWYVDGVEVHNA |
| | | KTKPREEQFNSTYRVVSVLTVLHQDWLNGKEYKCKVSNKG |
| | | LPSSIEKTISKAKGQPREPQVYTLPPSQEEMTKNQVSLTCLVK |
| | | GFYPSDIAVEWESNGQPENNYKTTPPVLDSDGSFFLYSRLTV |
| | | DKSRWQEGNVFSCSVMHEALHNHYTQKSLSLSLGK |
| KL2B242_HC | 212 | QVQLQESGPGLVKPSETLSLTCTVSGGSISSYYWSWLRQPAG |
| | | SGLEWIGRLYVSGFTNYNPSLKSRVTLSLDPSRNQLSLKLSSV |
| | | TAADTAVYYCAGDSGNYWGWFDPWGQGTLVTVSSASTKG |
| | | PSVFPLAPCSRSTSESTAALGCLVKDYFPEPVTVSWNSGALTS |
| | | GVHTFPAVLQSSGLYSLSSVVTVPSSSLGTKTYTCNVDHKPS |
| | | NTKVDKRVESKYGPPCPPCPAPEAAGGPSVFLFPPKPKDTLM |
| | | ISRTPEVTCVVVDVSQEDPEVQFNWYVDGVEVHNAKTKPRE |
| | | EQFNSTYRVVSVLTVLHQDWLNGKEYKCKVSNKGLPSSIEK |
| | | TISKAKGQPREPQVYTLPPSQEEMTKNQVSLTCLVKGFYPSDI |
| | | AVEWESNGQPENNYKTTPPVLDSDGSFFLYSRLTVDKSRWQ |
| | | EGNVFSCSVMHEALHNHYTQKSLSLSLGK |
| KL2B467_HC | 213 | QVQLVESGGGVVQPGRSLRLSCAASGFTFSYYGMHWVRQA |
| | | PGKGLEWVAFISYDGSNKYYADSVKGRFTISRDNSKNTLYL |
| | | QMNSLRAEDTAVYYCAHLPYSGSYWAFDYWGQGTQVTVSS |
| | | ASTKGPSVFPLAPSSKSTSGGTAALGCLVKDYFPEPVTVSWN |
| | | SGALTSGVHTFPAVLQSSGLYSLSSVVTVPSSSLGTQTYICNV |
| | | NHKPSNTKVDKKVEPKSCDKTHTCPPCPAPEAAGGPSVFLFP |
| | | PKPKDTLMISRTPEVTCVVVSVSHEDPEVKFNWYVDGVEVH |
| | | NAKTKPREEQYNSTYRVVSVLTVLHQDWLNGKEYKCKVSN |
| | | KALPAPIEKTISKAKGQPREPQVYTLPPSREEMTKNQVSLTCL |
| | | VKGFYPSDIAVEWESNGQPENNYKTTPPVLDSDGSFFLYSKL |
| | | TVDKSRWQQGNVFSCSVMHEALHNHYTQKSLSLSPGK |
| KL2B494_HC | 219 | QVQLVESGGGLVQPGGSLRLSCAASGFTFSHYAMSWVRQAP |
| | | GKGLEWVSTIGGSGGSTYYADSVKGRFTISRDNSKNTLYLQ |
| | | MNSLRAEDTAVYYCAKPHIVMVTALLYDGMDVWGQGTMV |
| | | TVSSASTKGPSVFPLAPSSKSTSGGTAALGCLVKDYFPEPVTV |
| | | SWNSGALTSGVHTFPAVLQSSGLYSLSSVVTVPSSSLGTQTYI |
| | | CNVNHKPSNTKVDKKVEPKSCDKTHTCPPCPAPEAAGGPSV |
| | | FLFPPKPKDTLMISRTPEVTCVVVSVSHEDPEVKFNWYVDGV |
| | | EVHNAKTKPREEQYNSTYRVVSVLTVLHQDWLNGKEYKCK |
| | | VSNKALPAPIEKTISKAKGQPREPQVYTLPPSREEMTKNQVSL |
| | | TCLVKGFYPSDIAVEWESNGQPENNYKTTPPVLDSDGSFFLY |
| | | SKLTVDKSRWQQGNVFSCSVMHEALHNHYTQKSLSLSPGK |

TABLE 11
Amino acid sequences of the LC (VL-CL) of selected anti-hK2 antibodies in a
mAb (Fab-Fc) format.

| HK2 | LC | |
|---|---|---|
| LIGHT | PROTEIN | |
| CHAIN | SEQ ID NO: | LC AMINO ACID SEQUENCE |
| m11B6_LC | 214 | DIVLTQSPASLAVSLGQRATISCRASESVEYFGTSLMHWYRQKPGQP |
| | | PKLLIYAASNVESGVPARFSGSGSGTDFSLNIQPVEEDDFSMYFCQQ |
| | | TRKVPYTFGGGTKLEIKRADAAPTVSIFPPSSEQLTSGGASVVCFLN |
| | | NFYPKDINVKWKIDGSERQNGVLNSWTDQDSKDSTYSMSSTLTLTK |
| | | DEYERHNSYTCEATHKTSTSPIVKSFNRNEC |
| h11B6_LC | 215 | DIVLTQSPDSLAVSLGERATINCKASESVEYFGTSLMHWYQQKPGQ |
| | | PPKLLIYAASNRESGVPDRFSGSGSGTDFTLTISSLQAEDVAVYYCQ |
| | | QTRKVPYTFGQGTKLEIKRTVAAPSVFIFPPSDEQLKSGTASVVCLL |
| | | NNFYPREAKVQWKVDNALQSGNSQESVTEQDSKDSTYSLSSTLTLS |
| | | KADYEKHKVYACEVTHQGLSSPVTKSFNRGEC |
| KL2B30_LC | 221 | DIQMTQSPSFLSASVGDRVTITCRASQGISSYLAWYQQKPGKAPKFL |
| | | IYAASTLQSGVPSRFSGSGSGTEFTLTISSLQPEDFATYYCQQLNSYP |
| | | LTFGGGTKVEIKRTVAAPSVFIFPPSDEQLKSGTASVVCLLNNFYPRE |
| | | AKVQWKVDNALQSGNSQESVTEQDSKDSTYSLSSTLTLSKADYEK |
| | | HKVYACEVTHQGLSSPVTKSFNRGEC |
| KL2B53_LC | 222 | DIVMTQSPSSLSASVGDRVTITCRASQDISNYLAWYQQKPGKVPKFL |
| | | IYAASTLHSGVPSRFSGSGSGTDFTLTISSLQPEDVATYYCQKYNSAP |
| | | YTFGQGTRLEIKRTVAAPSVFIFPPSDEQLKSGTASVVCLLNNFYPRE |
| | | AKVQWKVDNALQSGNSQESVTEQDSKDSTYSLSSTLTLSKADYEK |
| | | HKVYACEVTHQGLSSPVTKSFNRGEC |
| KL2B242_LC | 223 | SYELTQPPSVSVSPGETASITCSGDQLGENYACWYQQKPGQSPVLVI |
| | | YQDSKRPSGIPERFSGSNSGNTATLTISGTQALDEADYYCQAWDNSI |
| | | VVFGGGTKLTVLGQPKAAPSVTLFPPSSEELQANKATLVCLISDFYP |
| | | GAVTVAWKADSSPVKAGVETTTPSKQSNNKYAASSYLSLTPEQWK |
| | | SHRSYSCQVTHEGSTVEKTVAPTECS |
| KL2B467_LC | 224 | QSVLTQPPSVSVAPGQTASITCGGDNIGSKSVHWYQQKPGQAPVLV |
| | | VYDNSDRPSGIPERFSGSNSGTTATLTISRVEAGDEADYYCQVWDSS |
| | | SDHPVVFGGGTKVTVLGQPKAAPSVTLFPPSSEELQANKATLVCLIS |
| | | DFYPGAVTVAWKADSSPVKAGVETTTPSKQSNNKYAASSYLSLTPE |
| | | QWKSHRSYSCQVTHEGSTVEKTVAPTECS |
| KL2B494_LC | 220 | SSELTQPPSVSVAPGQTARITCGGNNIGSKSVHWYQQKPGQAPVLV |
| | | VYDDSDRPSGIPERFSGSNSGNTATLTISRVEAGDEADYYCQVWDS |
| | | SSDHVVFGGGTKLTVLGQPKAAPSVTLFPPSSEELQANKATLVCLIS |
| | | DFYPGAVTVAWKADSSPVKAGVETTTPSKQSNNKYAASSYLSLTPE |
| | | QWKSHRSYSCQVTHEGSTVEKTVAPTECS |

TABLE 12
SEQ ID Nos of the cDNA sequences of
HC and LC of selected hK2 antibodies

| | HC | LC | HC | LC |
|---|---|---|---|---|
| | Protein | Protein | cDNA | cDNA |
| | SEQ ID | SEQ ID | SEQ ID | SEQ ID |
| Antibody | NO: | NO: | NO: | NO: |
| m11B6 | 202 | 214 | 284 | 296 |
| hu11B6 | 203 | 215 | 285 | 297 |
| KL2B30 | 210 | 221 | 292 | 450 |
| KL2B53 | 211 | 222 | 293 | 451 |
| KL2B242 | 212 | 223 | 294 | 305 |
| KL2B467 | 213 | 224 | 295 | 306 |
| KL2B494 | 219 | 220 | 274 | 282 |

TABLE 13
Amino acid sequences of the variable domain of selected anti-hK2 scFvs antibodies in VH-
linker-VL (HL) or in VL-linker-VH (LH) format.

| scFv | | | SEQ ID |
|---|---|---|---|
| name | Acronym | Amino acid sequence of scFv | NO: |
| scFv1 | HCG5_LDC6_HL | QVQLQESGPGLVKPSDTLSLTCAVSGNSITSDYAWN | 8 |
| | | WIRQFPGKGLEWMGYISYSGSTTYNPSLKSRVTISRD | |
| | | TSKNQFSLKLSSVTPVDTAVYYCATGYYYGSGFWG | |
| | | QGTLVTVSSGGSEGKSSGSGSESKSTGGSDIVLTQSP | |
| | | DSLAVSLGERATINCKASESVEYFGTSLMHWYQQKP | |
| | | GQPPKLLIYAASNRESGVPDRFSGSGSGTDFTLTIQSV | |
| | | QAEDVSVYFCQQTRKVPYTFGQGTKLEIK | |
| scFv2 | HCG5_hu11B6_HL | QVQLQESGPGLVKPSDTLSLTCAVSGNSITSDYAWN | 9 |
| | | WIRQFPGKGLEWMGYISYSGSTTYNPSLKSRVTISRD | |
| | | TSKNQFSLKLSSVTPVDTAVYYCATGYYYGSGFWG | |
| | | QGTLVTVSSGGSEGKSSGSGSESKSTGGSDIVLTQSP | |
| | | DSLAVSLGERATINCKASESVEYFGTSLMHWYQQKP | |
| | | GQPPKLLIYAASNRESGVPDRFSGSGSGTDFTLTISSL | |
| | | QAEDVAVYYCQQTRKVPYTFGQGTKLEIK | |
| scFv3 | HCF3_hu11B6_HL | QVQLQESGPGLVKPSDTLSLTCAVSGNSITSDYAWN | 10 |
| | | WIRQFPGKGLEWIGYISYSGSTTYNPSLKSRVTISRDT | |
| | | SKNQFSLKLSSVTPVDTAVYYCATGYYYGSGFWGQ | |
| | | GTLVTVSSGGSEGKSSGSGSESKSTGGSDIVLTQSPD | |
| | | SLAVSLGERATINCKASESVEYFGTSLMHWYQQKPG | |
| | | QPPKLLIYAASNRESGVPDRFSGSGSGTDFTLTISSVQ | |
| | | AEDVAVYYCQQTRKVPYTFGQGTKLEIK | |
| scFv4 | HCG5_LCB7_HL | QVQLQESGPGLVKPSDTLSLTCAVSGNSITSDYAWN | 11 |
| | | WIRQFPGKGLEWMGYISYSGSTTYNPSLKSRVTISRD | |
| | | TSKNQFSLKLSSVTPVDTAVYYCATGYYYGSGFWG | |
| | | QGTLVTVSSGGSEGKSSGSGSESKSTGGSDIVLTQSP | |
| | | DSLAVSLGERATINCKASESVEYFGTSLMHWYQQKP | |
| | | GQPPKLLIYAASNRESGVPDRFSGSGSGTDFTLTISSV | |
| | | QAEDVAVYYCQQTRKVPYTFGQGTKLEIK | |
| scFv5 | LCD6_HCG5_LH | DIVLTQSPDSLAVSLGERATINCKASESVEYFGTSLM | 12 |
| | | HWYQQKPGQPPKLLIYAASNRESGVPDRFSGSGSGT | |
| | | DFTLTIQSVQAEDVSVYFCQQTRKVPYTFGQGTKLEI | |
| | | KGGSEGKSSGSGSESKSTGGSQVQLQESGPGLVKPS | |
| | | DTLSLTCAVSGNSITSDYAWNWIRQFPGKGLEWMG | |
| | | YISYSGSTTYNPSLKSRVTISRDTSKNQFSLKLSSVTP | |
| | | VDTAVYYCATGYYYGSGFWGQGTLVTVSS | |
| scFv6 | hu11B6_HCF3_LH | DIVLTQSPDSLAVSLGERATINCKASESVEYFGTSLM | 13 |
| | | HWYQQKPGQPPKLLIYAASNRESGVPDRFSGSGSGT | |
| | | DFTLTISSLQAEDVAVYYCQQTRKVPYTFGQGTKLEI | |
| | | KGGSEGKSSGSGSESKSTGGSQVQLQESGPGLVKPS | |
| | | DTLSLTCAVSGNSITSDYAWNWIRQFPGKGLEWIGYI | |
| | | SYSGSTTYNPSLKSRVTISRDTSKNQFSLKLSSVTPVD | |
| | | TAVYYCATGYYYGSGFWGQGTLVTVSS | |
| scFv7 | hul1B6_HCG5_LH | DIVLTQSPDSLAVSLGERATINCKASESVEYFGTSLM | 14 |
| | | HWYQQKPGQPPKLLIYAASNRESGVPDRFSGSGSGT | |
| | | DFTLTISSLQAEDVAVYYCQQTRKVPYTFGQGTKLEI | |
| | | KGGSEGKSSGSGSESKSTGGSQVQLQESGPGLVKPS | |
| | | DTLSLTCAVSGNSITSDYAWNWIRQFPGKGLEWMG | |
| | | YISYSGSTTYNPSLKSRVTISRDTSKNQFSLKLSSVTP | |
| | | VDTAVYYCATGYYYGSGFWGQGTLVTVSS | |
| scFv8 | LCB7_HCF3_LH | DIVLTQSPDSLAVSLGERATINCKASESVEYFGTSLM | 15 |
| | | HWYQQKPGQPPKLLIYAASNRESGVPDRFSGSGSGT | |
| | | DFTLTISSVQAEDVAVYYCQQTRKVPYTFGQGTKLE | |
| | | IKGGSEGKSSGSGSESKSTGGSQVQLQESGPGLVKPS | |
| | | DTLSLTCAVSGNSITSDYAWNWIRQFPGKGLEWIGYI | |
| | | SYSGSTTYNPSLKSRVTISRDTSKNQFSLKLSSVTPVD | |
| | | TAVYYCATGYYYGSGFWGQGTLVTVSS | |
| scFv9 | LCB7_HCG5_LH | DIVLTQSPDSLAVSLGERATINCKASESVEYFGTSLM | 16 |
| | | HWYQQKPGQPPKLLIYAASNRESGVPDRFSGSGSGT | |
| | | DFTLTISSVQAEDVAVYYCQQTRKVPYTFGQGTKLE | |
| | | IKGGSEGKSSGSGSESKSTGGSQVQLQESGPGLVKPS | |
| | | DTLSLTCAVSGNSITSDYAWNWIRQFPGKGLEWMG | |
| | | YISYSGSTTYNPSLKSRVTISRDTSKNQFSLKLSSVTP | |
| | | VDTAVYYCATGYYYGSGFWGQGTLVTVSS | |
| scFv10 | LCD6_HCF3_LH | DIVLTQSPDSLAVSLGERATINCKASESVEYFGTSLM | 17 |
| | | HWYQQKPGQPPKLLIYAASNRESGVPDRFSGSGSGT | |
| | | DFTLTIQSVQAEDVSVYFCQQTRKVPYTFGQGTKLEI | |
| | | KGGSEGKSSGSGSESKSTGGSQVQLQESGPGLVKPS | |
| | | DTLSLTCAVSGNSITSDYAWNWIRQFPGKGLEWIGYI | |
| | | SYSGSTTYNPSLKSRVTISRDTSKNQFSLKLSSVTPVD | |
| | | TAVYYCATGYYYGSGFWGQGTLVTVSS | |
| scFv11 | hu11B6_LCB7_HL | QVQLQESGPGLVKPSDTLSLTCAVSGNSITSDYAWN | 18 |
| | | WIRQPPGKGLEWIGYISYSGSTTYNPSLKSRVTMSRD | |
| | | TSKNQFSLKLSSVTAVDTAVYYCATGYYYGSGFWG | |
| | | QGTLVTVSSGGSEGKSSGSGSESKSTGGSDIVLTQSP | |
| | | DSLAVSLGERATINCKASESVEYFGTSLMHWYQQKP | |
| | | GQPPKLLIYAASNRESGVPDRFSGSGSGTDFTLTISSV | |
| | | QAEDVAVYYCQQTRKVPYTFGQGTKLEIK | |
| scFv12 | hu11B6_LCD6_HL | QVQLQESGPGLVKPSDTLSLTCAVSGNSITSDYAWN | 19 |
| | | WIRQPPGKGLEWIGYISYSGSTTYNPSLKSRVTMSRD | |
| | | TSKNQFSLKLSSVTAVDTAVYYCATGYYYGSGFWG | |
| | | QGTLVTVSSGGSEGKSSGSGSESKSTGGSDIVLTQSP | |
| | | DSLAVSLGERATINCKASESVEYFGTSLMHWYQQKP | |
| | | GQPPKLLIYAASNRESGVPDRFSGSGSGTDFTLTIQSV | |
| | | QAEDVSVYFCQQTRKVPYTFGQGTKLEIK | |
| scFv13 | hu11B6_HL | QVQLQESGPGLVKPSDTLSLTCAVSGNSITSDYAWN | 20 |
| | | WIRQPPGKGLEWIGYISYSGSTTYNPSLKSRVTMSRD | |
| | | TSKNQFSLKLSSVTAVDTAVYYCATGYYYGSGFWG | |
| | | QGTLVTVSSGGSEGKSSGSGSESKSTGGSDIVLTQSP | |
| | | DSLAVSLGERATINCKASESVEYFGTSLMHWYQQKP | |
| | | GQPPKLLIYAASNRESGVPDRFSGSGSGTDFTLTISSL | |
| | | QAEDVAVYYCQQTRKVPYTFGQGTKLEIK | |
| scFv14 | LCD6_hul1B6_LH | DIVLTQSPDSLAVSLGERATINCKASESVEYFGTSLM | 21 |
| | | HWYQQKPGQPPKLLIYAASNRESGVPDRFSGSGSGT | |
| | | DFTLTIQSVQAEDVSVYFCQQTRKVPYTFGQGTKLEI | |
| | | KGGSEGKSSGSGSESKSTGGSQVQLQESGPGLVKPS | |
| | | DTLSLTCAVSGNSITSDYAWNWIRQPPGKGLEWIGYI | |
| | | SYSGSTTYNPSLKSRVTMSRDTSKNQFSLKLSSVTAV | |
| | | DTAVYYCATGYYYGSGFWGQGTLVTVSS | |
| scFv15 | hu11B6_LH | DIVLTQSPDSLAVSLGERATINCKASESVEYFGTSLM | 22 |
| | | HWYQQKPGQPPKLLIYAASNRESGVPDRFSGSGSGT | |
| | | DFTLTISSLQAEDVAVYYCQQTRKVPYTFGQGTKLEI | |
| | | KGGSEGKSSGSGSESKSTGGSQVQLQESGPGLVKPS | |
| | | DTLSLTCAVSGNSITSDYAWNWIRQPPGKGLEWIGYI | |
| | | SYSGSTTYNPSLKSRVTMSRDTSKNQFSLKLSSVTAV | |
| | | DTAVYYCATGYYYGSGFWGQGTLVTVSS | |
| scFv16 | LCB7_hul1B6_LH | DIVLTQSPDSLAVSLGERATINCKASESVEYFGTSLM | 23 |
| | | HWYQQKPGQPPKLLIYAASNRESGVPDRFSGSGSGT | |
| | | DFTLTISSVQAEDVAVYYCQQTRKVPYTFGQGTKLE | |
| | | IKGGSEGKSSGSGSESKSTGGSQVQLQESGPGLVKPS | |
| | | DTLSLTCAVSGNSITSDYAWNWIRQPPGKGLEWIGYI | |
| | | SYSGSTTYNPSLKSRVTMSRDTSKNQFSLKLSSVTAV | |
| | | DTAVYYCATGYYYGSGFWGQGTLVTVSS | |
| scFv17 | KL2B413_HL | EVQLVESGGGLVQPGGSLRLSCAASGFTFSSYWMT | 133 |
| | | WVRQAPGKGLEWVANIKQDGSERYYVDSVKGRFTI | |
| | | SRDNAKNSLYLQMNSLRAEDTAVYYCARDQNYDIL | |
| | | TGHYGMDVWGQGTTVTVSSGGSEGKSSGSGSESKS | |
| | | TGGSEIVLTQSPSFLSASVGDRVTITCRASQGISSYLS | |
| | | WYQQKPGKAPKLLIYATSTLQSGVPSRFSGSGSGTEF | |
| | | TLTISSLQPEDFATYYCQQLNSYPRTFGQGTKVEIK | |
| scFv18 | KL2B413_LH | EIVLTQSPSFLSASVGDRVTITCRASQGISSYLSWYQQ | 134 |
| | | KPGKAPKLLIYATSTLQSGVPSRFSGSGSGTEFTLTIS | |
| | | SLQPEDFATYYCQQLNSYPRTFGQGTKVEIKGGSEG | |
| | | KSSGSGSESKSTGGSEVQLVESGGGLVQPGGSLRLSC | |
| | | AASGFTFSSYWMTWVRQAPGKGLEWVANIKQDGSE | |
| | | RYYVDSVKGRFTISRDNAKNSLYLQMNSLRAEDTA | |
| | | VYYCARDQNYDILTGHYGMDVWGQGTTVTVSS | |
| scFv19 | KL2B359_HL | QVQLQESGPGLVKPSQTLSLTCTVSGNSITSDYAWN | 135 |
| | | WIRQFPGKRLEWIGYISYSGSTTYNPSLKSRVTISRDT | |
| | | SKNQFSLKLSSVTAADTAVYYCATGYYYGSGFWGQ | |
| | | GTLVTVSSGGSEGKSSGSGSESKSTGGSEIVLTQSPAT | |
| | | LSLSPGERATLSCRASESVEYFGTSLMHWYQQKPGQ | |
| | | PPRLLIYAASNVESGIPARFSGSGSGTDFTLTISSVEPE | |
| | | DFAVYFCQQTRKVPYTFGGGTKVEIK | |
| scFv20 | KL2B359_LH | EIVLTQSPATLSLSPGERATLSCRASESVEYFGTSLMH | 136 |
| | | WYQQKPGQPPRLLIYAASNVESGIPARFSGSGSGTDF | |
| | | TLTISSVEPEDFAVYFCQQTRKVPYTFGGGTKVEIKG | |
| | | GSEGKSSGSGSESKSTGGSQVQLQESGPGLVKPSQTL | |
| | | SLTCTVSGNSITSDYAWNWIRQFPGKRLEWIGYISYS | |
| | | GSTTYNPSLKSRVTISRDTSKNQFSLKLSSVTAADTA | |
| | | VYYCATGYYYGSGFWGQGTLVTVSS | |
| scFv21 | KL2B357_HL | QVQLQESGPGLVKPSQTLSLTCTVSGNSITSDYAWN | 318 |
| | | WIRQFPGKGLEWIGYISYSGSTTYNPSLKSRVTISRDT | |
| | | SKNQFSLKLSSVTAADTAVYYCATGYYYGSGFWGQ | |
| | | GTLVTVSSGGSEGKSSGSGSESKSTGGSDIVLTQSPD | |
| | | SLAVSLGERATINCRASESVEYFGTSLMHWYQQKPG | |
| | | QPPKLLIYAASNVESGVPDRFSGSGSGTDFTLTISSLQ | |
| | | AEDVAVYFCQQTRKVPYTFGGGTKVEIK | |
| scFv22 | KL2B357_LH | DIVLTQSPDSLAVSLGERATINCRASESVEYFGTSLM | 319 |
| | | HWYQQKPGQPPKLLIYAASNVESGVPDRFSGSGSGT | |
| | | DFTLTISSLQAEDVAVYFCQQTRKVPYTFGGGTKVEI | |
| | | KGGSEGKSSGSGSESKSTGGSQVQLQESGPGLVKPS | |
| | | QTLSLTCTVSGNSITSDYAWNWIRQFPGKGLEWIGYI | |
| | | SYSGSTTYNPSLKSRVTISRDTSKNQFSLKLSSVTAA | |
| | | DTAVYYCATGYYYGSGFWGQGTLVTVSS | |
| scFv23 | KL2B358_HL | QVQLQESGPGLVKPSQTLSLTCTVSGNSITSDYAWN | 320 |
| | | WIRQPPGKGLEWIGYISYSGSTTYNPSLKSRVTISRDT | |
| | | SKNQFSLKLSSVTAADTAVYYCATGYYYGSGFWGQ | |
| | | GTLVTVSSGGSEGKSSGSGSESKSTGGSEIVLTQSPAT | |
| | | LSLSPGERATLSCRASESVEYFGTSLMHWYQQKPGQ | |
| | | PPRLLIYAASNVESGIPARFSGSGSGTDFTLTISSVEPE | |
| | | DFAVYFCQQTRKVPYTFGGGTKVEIK | |
| scFv24 | KL2B358_LH | EIVLTQSPATLSLSPGERATLSCRASESVEYFGTSLMH | 321 |
| | | WYQQKPGQPPRLLIYAASNVESGIPARFSGSGSGTDF | |
| | | TLTISSVEPEDFAVYFCQQTRKVPYTFGGGTKVEIKG | |
| | | GSEGKSSGSGSESKSTGGSQVQLQESGPGLVKPSQTL | |
| | | SLTCTVSGNSITSDYAWNWIRQPPGKGLEWIGYISYS | |
| | | GSTTYNPSLKSRVTISRDTSKNQFSLKLSSVTAADTA | |
| | | VYYCATGYYYGSGFWGQGTLVTVSS | |
| scFv25 | KL2B360_HL | QVQLQESGPGLVKPSQTLSLTCTVSGNSITSDYAWN | 322 |
| | | WIRQFPGKGLEWIGYISYSGSTTYNPSLKSRVTISRDT | |
| | | SKNQFSLKLSSVTAADTAVYYCATGYYYGSGFWGQ | |
| | | GTLVTVSSGGSEGKSSGSGSESKSTGGSEIVLTQSPAT | |
| | | LSLSPGERATLSCRASESVEYFGTSLMHWYQQKPGQ | |
| | | PPRLLIYAASNVESGIPARFSGSGSGTDFTLTISSVEPE | |
| | | DFAVYFCQQTRKVPYTFGGGTKVEIK | |
| scFv26 | KL2B360_LH | EIVLTQSPATLSLSPGERATLSCRASESVEYFGTSLMH | 323 |
| | | WYQQKPGQPPRLLIYAASNVESGIPARFSGSGSGTDF | |
| | | TLTISSVEPEDFAVYFCQQTRKVPYTFGGGTKVEIKG | |
| | | GSEGKSSGSGSESKSTGGSQVQLQESGPGLVKPSQTL | |
| | | SLTCTVSGNSITSDYAWNWIRQFPGKGLEWIGYISYS | |
| | | GSTTYNPSLKSRVTISRDTSKNQFSLKLSSVTAADTA | |
| | | VYYCATGYYYGSGFWGQGTLVTVSS | |
| scFv27 | KL2B467_HL | QVQLVESGGGVVQPGRSLRLSCAASGFTFSYYGMH | 324 |
| | | WVRQAPGKGLEWVAFISYDGSNKYYADSVKGRFTI | |
| | | SRDNSKNTLYLQMNSLRAEDTAVYYCAHLPYSGSY | |
| | | WAFDYWGQGTQVTVSSGGSEGKSSGSGSESKSTGG | |
| | | SQSVLTQPPSVSVAPGQTASITCGGDNIGSKSVHWY | |
| | | QQKPGQAPVLVVYDNSDRPSGIPERFSGSNSGTTATL | |
| | | TISRVEAGDEADYYCQVWDSSSDHPVVFGGGTKVT | |
| | | V | |
| scFv28 | KL2B467_LH | QSVLTQPPSVSVAPGQTASITCGGDNIGSKSVHWYQ | 325 |
| | | QKPGQAPVLVVYDNSDRPSGIPERFSGSNSGTTATLT | |
| | | ISRVEAGDEADYYCQVWDSSSDHPVVFGGGTKVTV | |
| | | GGSEGKSSGSGSESKSTGGSQVQLVESGGGVVQPGR | |
| | | SLRLSCAASGFTFSYYGMHWVRQAPGKGLEWVAFI | |
| | | SYDGSNKYYADSVKGRFTISRDNSKNTLYLQMNSLR | |
| | | AEDTAVYYCAHLPYSGSYWAFDYWGQGTQVTVSS | |
| scFv39 | KL2B494_HL | QVQLVESGGGLVQPGGSLRLSCAASGFTFSHYAMS | 308 |
| | | WVRQAPGKGLEWVSTIGGSGGSTYYADSVKGRFTIS | |
| | | RDNSKNTLYLQMNSLRAEDTAVYYCAKPHIVMVTA | |
| | | LLYDGMDVWGQGTMVTVSS | |
| | | GGSEGKSSGSGSESKSTGGSSSELTQPPSVSVAPGQT | |
| | | ARITCGGNNIGSKSVHWYQQKPGQAPVLVVYDDSD | |
| | | RPSGIPERFSGSNSGNTATLTISRVEAGDEADYYCQV | |
| | | WDSSSDHVVFGGGTKLTVL | |
| scFv40 | KL2B494_LH | SSELTQPPSVSVAPGQTARITCGGNNIGSKSVHWYQ | 316 |
| | | QKPGQAPVLVVYDDSDRPSGIPERFSGSNSGNTATLT | |
| | | ISRVEAGDEADYYCQVWDSSSDHVVFGGGTKLTVL | |
| | | GGSEGKSSGSGSESKSTGGSQVQLVESGGGLVQPGG | |
| | | SLRLSCAASGFTFSHYAMSWVRQAPGKGLEWVSTIG | |
| | | GSGGSTYYADSVKGRFTISRDNSKNTLYLQMNSLRA | |
| | | EDTAVYYCAKPHIVMVTALLYDGMDVWGQGTMVT | |
| | | VSS | |
| scFv41 | KL2B30_HL | QVQLQESGPGLVKPSETLSLTCTVSGGSISSYYWSWI | 404 |
| | | RQPPGKGLEWIGYIYYSGSTNYNPSLKSRVTISVDTS | |
| | | KNQFSLKLSSVTAADTAVYYCAGTTIFGVVTPNFYY | |
| | | GMDVWGQGTTVTVSSGGSEGKSSGSGSESKSTGGS | |
| | | DIQMTQSPSFLSASVGDRVTITCRASQGISSYLAWYQ | |
| | | QKPGKAPKFLIYAASTLQSGVPSRFSGSGSGTEFTLTI | |
| | | SSLQPEDFATYYCQQLNSYPLTFGGGTKVEIK | |
| scFv42 | KL2B30_LH | DIQMTQSPSFLSASVGDRVTITCRASQGISSYLAWYQ | 405 |
| | | QKPGKAPKFLIYAASTLQSGVPSRFSGSGSGTEFTLTI | |
| | | SSLQPEDFATYYCQQLNSYPLTFGGGTKVEIKGGSEG | |
| | | KSSGSGSESKSTGGSQVQLQESGPGLVKPSETLSLTC | |
| | | TVSGGSISSYYWSWIRQPPGKGLEWIGYIYYSGSTNY | |
| | | NPSLKSRVTISVDTSKNQFSLKLSSVTAADTAVYYCA | |
| | | GTTIFGVVTPNFYYGMDVWGQGTTVTVSS | |
| scFv43 | KL2B53_HL | EVQLVESGGGVVQPGRSLRLSCVASGFTFSSYDIHW | 406 |
| | | VRQAPGKGLEWVAIISYDGSKKDYTDSVKGRFTISR | |
| | | DNSKNTLYLQMDSLRVEDSAVYSCARESGWSHYYY | |
| | | YGMDVWGQGTMVTVSSGGSEGKSSGSGSESKSTGG | |
| | | SDIVMTQSPSSLSASVGDRVTITCRASQDISNYLAWY | |
| | | QQKPGKVPKFLIYAASTLHSGVPSRFSGSGSGTDFTL | |
| | | TISSLQPEDVATYYCQKYNSAPYTFGQGTRLEIK | |
| scFv44 | KL2B53_LH | DIVMTQSPSSLSASVGDRVTITCRASQDISNYLAWYQ | 407 |
| | | QKPGKVPKFLIYAASTLHSGVPSRFSGSGSGTDFTLTI | |
| | | SSLQPEDVATYYCQKYNSAPYTFGQGTRLEIKGGSE | |
| | | GKSSGSGSESKSTGGSEVQLVESGGGVVQPGRSLRL | |
| | | SCVASGFTFSSYDIHWVRQAPGKGLEWVAIISYDGS | |
| | | KKDYTDSVKGRFTISRDNSKNTLYLQMDSLRVEDSA | |
| | | VYSCARESGWSHYYYYGMDVWGQGTMVTVSS | |
| scFv45 | KL2B242_HL | QVQLQESGPGLVKPSETLSLTCTVSGGSISSYYWSWL | 408 |
| | | RQPAGSGLEWIGRLYVSGFTNYNPSLKSRVTLSLDPS | |
| | | RNQLSLKLSSVTAADTAVYYCAGDSGNYWGWFDP | |
| | | WGQGTLVTVSSGGSEGKSSGSGSESKSTGGSSYELT | |
| | | QPPSVSVSPGETASITCSGDQLGENYACWYQQKPGQ | |
| | | SPVLVIYQDSKRPSGIPERFSGSNSGNTATLTISGTQA | |
| | | LDEADYYCQAWDNSIVVFGGGTKLTVL | |
| scFv46 | KL2B242_LH | SYELTQPPSVSVSPGETASITCSGDQLGENYACWYQ | 409 |
| | | QKPGQSPVLVIYQDSKRPSGIPERFSGSNSGNTATLTI | |
| | | SGTQALDEADYYCQAWDNSIVVFGGGTKLTVLGGS | |
| | | EGKSSGSGSESKSTGGSQVQLQESGPGLVKPSETLSL | |
| | | TCTVSGGSISSYYWSWLRQPAGSGLEWIGRLYVSGF | |
| | | TNYNPSLKSRVTLSLDPSRNQLSLKLSSVTAADTAV | |
| | | YYCAGDSGNYWGWFDPWGQGTLVTVSS | |

### Example 24. Biophysical Characterization of Anti-hK2 Antibodies

### Affinity and Thermal Stability of Anti-hK2 Antibodies.

[0765] Affinity of selected hK2 antibodies for soluble hK2 was measured by surface plasmon resonance (SPR). SPR is a label-free technique to study the strength of an interaction between two binding partners by measuring the change in mass upon complex formation and dissociation. Antibodies were captured on a sensor chip coated with an anti-Fc antibody followed by injection of soluble hK2 at various concentrations and specified association and dissociation times. Post dissociation, the surface was regenerated with an appropriate solution to prepare for the next interaction. Kinetic information (on-rate and off-rate constants) were extracted by fitting sensorgrams to the 1:1 Langmuir model. Binding affinity (K_{D}) are reported as the ratio of rate constants (k_{off}/kₒₙ). K_{D} values of selected hK2 antibodies are listed in Table 14.

[0766] Thermal stability was determined by Differential Scanning Fluorimetry (NanoDSF) using an automated Prometheus instrument. NanoDSF was used to measure Tm of molecules at a concentration of 0.5 mg/mL in Phosphate Buffered Saline, pH 7.4. Measurements were made by loading samples into 24 well capillary from a 384 well sample plate. Duplicate runs were performed for each sample. The thermal scans span from 20° C., to 95° C. at a rate of 1.0° C./minute. Intrinsic tryptophan and tyrosine fluorescence were monitored at the emission wavelengths of 330 nm and 350 nm, and the F350/F330 nm ratio were plotted against temperature to generate unfolding curves. Measured Tm values are listed in Table 14.

TABLE 14
K_{D} and Tm of selected molecules

| Molecule | K_{D} (nM) | Tm (° C.) |
|---|---|---|
| KL2B413 (scFv-LH-Fc) | 34.3 | 67 |
| KL2B359 (scFv-LH-Fc) | 0.7-1 | 67 |
| KL2B30 (Fab) | 0.460 | >70 |
| KL2B242 (Fab) | 0.040 | >70 |
| KL2B53 (Fab) | 0.080 | >70 |
| KL2B467 (Fab) | 0.078 | >70 |
| KL2B494 (Fab) | 0.053 | >70 |

[0767] KL2B413 scFv generated from the Ablexis immunization campaign had a thermal stability (Tm) of 67° C. as measured by Nano DSF and a binding affinity (K_{D}) to human hK2 of about 34 nM. Clone KL2B359 obtained for the re-humanization campaign and which had maintained a binding affinity similar to murine 11B6 was converted to scFv-Fc and CAR-T for additional profiling. KL2B359 scFv shows a Tm of 67° C. and a binding affinity (K_{D}) to hK2 of ˜0.7-InM. KL2B30, KL2B242, KL2B53, KL2B467 and KL2B494 Fab showed binding affinities below 0.5 nM and Tm values above 70° C.

### Epitope Mapping

[0768] The epitope and paratope of selected anti-hK2 antibodies and anti-hK2/CD3 bispecific antibodies were determined by hydrogen-deuterium exchange mass spectrometry (HDX-MS). Human KLK2 antigen was used for epitope and paratope mapping experiment.

[0769] Briefly, purified KLK2 antigen was incubated with and without anti-hK2 antibodies or anti-hK2/CD3 bispecific antibodies in deuterium oxide labeling buffer. The hydrogen-deuterium exchange (HDX) mixture was quenched at different time point by the addition of 8 M urea. IM TCEP, pH 3.0. The quenched sample was passed over an immobilized pepsin/FPXIII column at 600 μL/min equilibrated with buffer A (1% acetonitrile. 0.1% FA in H₂₀) at room temperature. Peptic fragments were loaded onto a reverse phase trap column at 600 L/min with buffer A and desalted for 1 min (600 μL buffer A). The desalted fragments were separated by a C18 column with a linear gradient of 8% to 35% buffer B (95% acetonitrile. 5% H₂O. 0.0025% TFA) at 100 μL/min over 20 min and analyzed by mass spectrometry. Mass spectrometric analyses were carried out using an LTQ™ Orbitrap Fusion Lumos mass spectrometer (Thermo Fisher Scientific) with the capillary temperature at 275° C. resolution 150,000, and mass range (m/z) 300-1,800. BioPharma Finder 3.0 (Thermo Fisher Scientific) was used for the peptide identification of non-deuterated samples prior to the HDX experiments. HDExaminer version 2.5 (Sierra Analytics, Modesto, CA) was used to extract centroid values from the MS raw data files for the HDX experiments.

[0770] Incubation of hK2 antibodies, hul1B6, KL2B494, KL2B467. KL2B30. KL2B413 and KL2B53 with soluble hK2 protein resulted in different patterns of hydrogen exchange and overall protection. The protected segments were mapped onto the sequence of hK2 antigen to visualize the binding epitopes. KL2B494. KL2B467 and KL2B30 bound to common sequences of (i) residues 174-178 (SEQ ID NO: 111. KVTEF) (e.g., KL2B494. KL2B467 and KL2B30 bound at least three of the residues of SEQ ID NO: 111, namely, the KVT residues at 174-176) and (ii) residues 230-234 (SEQ ID NO: 112. HYRKW) (e.g., KL2B494. KL2B467 and KL2B30 bound at least three of the residues of SEQ ID NO: 112, namely, the HYR residues at 230-232). KL2B413 also bound all residues of SEQ ID NO: 111 and the KW residues of SEQ ID NO: 112. An embodiment of the present invention provides an isolated protein comprising an antigen binding domain that binds hK2, wherein said antigen binding domain binds to hK2 within epitopes having sequences of SEQ ID NO: 111 and SEQ ID NO: 112: for example, said antigen binding domain binds to all residues, or at least four residues, or at least three residues of SEQ ID NO: 111 and binds to all residues, or at least four residues, or at least three residues of SEQ ID NO: 112.

[0771] KL2B53 showed a different pattern of protection and bound to a sequence consisting of residues 27-32 (Seq ID NO: 113. SHGWAH), 60-75 (SEQ ID NO: 114, RHNLFEPEDTGQRVP) and 138-147 (SEQ ID NO: 115, GWGSIEPEE).

[0772] According to an embodiment, an isolated anti-hK2/anti -CD3 protein (e.g., hu11B6, KL2B494, KL2B467. KL2B30, KL2B413, or KL2B53) comprises an hk2-specific antigen binding domain that specifically binds to a discontinuous epitope (i.e., epitopes whose residues are distantly placed in the sequence) of hK2 comprising one or more amino acid sequences selected from the group consisting of SEQ ID NO: 111, 112, 113, 114, and 115.

[0773] The paratope of anti-hK2 antibodies hu11B6, KL2B494, KL2B467, KL2B413 and anti-hK2/CD3 bispecific antibodies KLCB113 and KLCB80 were identified based on significant differences in deuterium uptake from the HDExaminer residue plots. KL2BB494 comprises three paratope regions two of which are located in the KL2B494 heavy chain variable domain (GFTFSH (SEQ ID NO: 455) and TAVYYCAKPHIVMVTAL (SEQ ID NO: 456)) and a single paratope region located within the light chain variable domain (YDDSDRPSGIPER (SEQ ID NO: 457)). KL2B467 comprises three paratopc regions, two of which are located in the KL2B467 heavy chain variable domain (FTFSY (SEQ ID NO: 458) and GSYWAFDY (SEQ ID NO: 459)) and a single paratope region within the light chain variable domain (DNSD (SEQ ID NO: 460)). Hu11B6 comprises a single epitope region located in the heavy chain (GNSITSDYA (SEQ ID NO: 461)). KL2B413 comprises two paratope regions located in the heavy chain variable domain (GFTF (SEQ ID NO: 462) and ARDQNYDIL (SEQ ID NO: 463)). KL2B30 of bispecific KLCB80 comprise a paratope region locate in the heavy chain (comprising amino acid residues TIF and VTPNF (SEQ ID NO: 464)) and a paratope region located in the light chain (YAASTLQSG (SEQ ID NO: 465)). KL2B53 of bispecific KLCB113 comprise a single paratope region locate in the heavy chain (comprising amino acid residues ESGWSHY (SEQ ID NO: 466)).

### Example 25-MMAF Conjugation to KL2B30 Fab

[0774] Immunoconjugates of the present invention were made by conjugating the KL2B30 Fab (identified as KL2B997) to MMAF. Conjugation was performed via random conjugation and site-specific conjugation; such methods are described, for example, in WO2020/229974. As described herein, KL2B997 (the Fab of KL2B30) comprises a HCDR1, a HCDR2, a HCDR3, a LCDR1, a LCDR2 and a LCDR3 of SEQ ID NOs: 170, 171, 172, 173, 174 and 175, respectively; and KL2B997 comprises a VH of SEQ ID NO: 162 and a VL of SEQ ID NO: 163.

[0775] In FIG. 1, the term “DAR” is “drug-to -antibody ratio”, which refers to the number of drug molecules, i.e., MMAF, attached to the antibody moiety, i.e., KL2B997. The number of drug molecules bound per antibody moiety or the degree of labeling is a parameter commonly used in the art and is designated “DAR” for “drug-antibody ratio.”

[0776] To evaluate target cell binding of the KL2B30 Fab with different conjugation variants, VCaP cells were used as hK2-positive target cells and DU145 cells were used as hK2-negative cells. KL2B30 parental antibody (comprising a heavy chain and light chain of SEQ ID NO: 210 and SEQ ID NO: 221, respectively) and hul1B6 (an anti-hK2 antibody, also referred to herein as h11B6, comprising a heavy chain and light chain of SEQ ID NO: 203 and SEQ ID NO: 215, respectively) were included as positive controls. The h11B6 antibody is described in U.S. Pat. No. 10,100,125, which is incorporated by reference herein. An anti-Human F(ab′)₂ fragment specific secondary detection antibody was used for detecting Fab-based binding. Test antibodies were incubated with target cells at 4° C. for 60 minutes and detected by secondary staining. Cell binding was quantified by flow cytometry based on secondary antibody binding signal and gated from on live cells. Results indicated positive and dose-dependent cell binding using all three tested methods, which included un-conjugated KL2B997, random conjugation of KL2B997 and site-specific conjugation of KL2B997 (depicted in FIG. 1 as KL2B997*, KL2B997 NHS and KL2B997 SORT). KL2B30 Fab was shown to bind specifically to hK2-positive VCaP cells and not to hK2-negative DU145 cells. As shown in FIG. 1, results showed the KL2B30 Fab binds to hK2-expressing VCaP cells and can internalize and trigger internalization-based cell killing when conjugated with MMAF.

[0777] The immunoconjugates described above were made via random conjugation and site-specific conjugation. For site-specific conjugation, 2.1 mgs of h11B6 at 2 mg/mL in 1× dPBS (Thermo Fisher 14190144) was deglycosylated with 5 ul of Rapid PNGaseF (NEB #P0711S) overnight at 37° C. Bacterial transglutaminase (bTG; Activa TI from Ajinomoto) was added to 30% w/v along with a 1000× molar excess of the amino-PEG4-(PEG3-azide)₂ branched substrate (CP-2051 Conju-Probe LLC) and incubated overnight at room temperature. The azide-modified mAb was purified on an AKTA Avant instrument equipped with a 1 ml Mabselect column (GE 11003493) and exchanged into 1× dPBS with 10 mL Zeba desalting columns (Thermo Fisher). DBCO-PEG4-vc-PAB-MMAF (Levena Biopharma) was added in 10× molar excess and reaction was monitored by LC-MS until reaching drug: antibody ratio of 4. The final h11B6-vcMMAF ADC was purified on a Zeba desalting column followed by concentration and diafiltration with an Amicon concentrator.

[0778] For random conjugation, KL2B30 was first reacted with to NHS-PEG4-azide (Thermo Fisher Cat #26130). To 1.5mgs of KL2B30 at 1 mg/ml in 1× dPBS was added 30 ul of 1M pH 9 sodium bicarbonate (BDH #144-55-8) and immediately followed by the addition of a 7× molar ratio of NHS-PEG4-azide. Reaction was monitored by mass spectrometry until the degree of labeling reached 2-2.5 and then quenched by addition of Tris pH 8.5 (Teknova T1085) to a final concentration of 100 mM. Following removal of unreacted NHS-PEG4-azide, a 10× molar excess of DBCO-PEG4-vc-PAB-MMAF was added and incubated for 1 hour at 37° C. Final ADC (DAR=2.7) was purified by 10 ml Zeba desalt column followed by concentration and diafiltration with an Amicon concentrator.

[0779] The KL2B997 site-specific ADC (antibody-drug conjugate) was prepared by conjugation via the sortase tag. 1 mg of KL2B997 at 1 mg/ml was incubated with S, pyogenes sortase A enzyme (2 μM) [reference to Chen et al. PNAS 2011:11399], and an excess of Gly3-vcMMAF (Levena Biopharma) in 50 mM Tris pH 7.5, 150 mM NaCl, 10 mM CaCl2 buffer. Reaction was incubated at for 1 hour at 37° C. The conjugate as purified on a 1 mL HisTrap column (Cytiva 17524701) on an AKTA Avant instrument. The ADC was further purified over a 24 ml Superdex 75 10/300 (Cytiva 29148721) in 1× dPBS to remove any aggregate or residual substrates. KL2B997 randomly conjugated ADC was prepared by addition of NHS-PEG4-azide followed by reaction with DBCO-vcMMAF as described above.

### Example 26-TOPA-KL2B1251 Fab

[0780] A method of conjugating a KL2B30 Fab (identified as KL2B1251) to TOPA is provided below.

### Preparation of TOPA-KL2B1251

[0781] Random TOPA modification of Fab: KL2B1251 Fab was diluted to 1 mg/ml in sterile 1xdPBS. Adjusted the pH of the mAb to 9.0 with sodium bicarbonate buffer pH 9 (VWR 144-55-8). Then, 8× molar excess of TOPA (TOPA-phenyl-NCS (intermediate); 50 mM stock dissolved in DMSO) was added, and the pool was incubated at room temperature without shaking for approximately 1 hour. The addition of TOPA was monitored by intact mass ESI-TOF LC-MS on an Agilent G224 instrument until the CAR value was between 1.5-2.0. Pool was quenched by addition of 1M Tris pH 8.5 (Teknova T1085) to a final concentration of 100 mM. Excess free chelator was removed by successive rounds of desalting and eluting 15mls of conjugate pool at a time over a 55 ml HiPrep 26/10 desalting column (17508701-Cytiva). Equilibration and elution all performed in 1xdPBS. Sample was then concentrated to 2mls. To confirm no excess chelator was present, 3× rounds of sample dilution to 15mls followed by concentration to 1 ml using a 50,000MWCO Amicon concentrator device was performed. The final conjugate was confirmed to be monomeric by analytical size exclusion chromatography on a Tosoh TSKgel G3000SWx1 7.8 mm×30 cm, 5 u column; column temperature: room temperature; the column was eluted 0.2M sodium phosphate pH 6.8; flow rate: 0.8 mL/min; 18 min run; injection volume: 18 ul.

[0782] It is understood that the examples and embodiments described herein are for illustrative purposes only, and that changes could be made to the embodiments described above without departing from the broad inventive concept thereof. It is understood, therefore, that this invention is not limited to the particular embodiments disclosed, but it is intended to cover modifications within the spirit and scope of the invention as defined by the appended claims.

1. An immunoconjugate comprising: a therapeutic moiety conjugated to an antigen binding domain with binding specificity for kallikrein related peptidase 2 (hK2).

2. The immunoconjugate according to claim 1, wherein the therapeutic moiety is a cytotoxic agent.

3. The immunoconjugate according to claim 1, wherein the therapeutic moiety is an imaging agent.

4. The immunoconjugate according to claim 1, wherein the therapeutic moiety comprises a radiometal.

5. The immunoconjugate according to claim 4, wherein the radiometal is selected from the group consisting of ²²⁵Ac, ¹⁷⁷Lu, -³²P, ⁴⁷Sc, ⁶⁷Cu, ⁷⁷ As, ⁸⁹Sr, ⁹⁰Y, ⁹⁹Tc, ¹⁰⁵Rh, ¹⁰⁹Pd, ¹¹¹Ag, ¹³¹I, ¹⁴⁹Tb, ¹⁵²Tb, ¹⁵⁵Tb, ¹⁵³Sm, ¹⁵⁹Gd, ¹⁶⁵Dy, ¹⁶⁶Ho, ¹⁶⁹Er, ¹⁸⁶Re, ¹⁸⁸Re, ¹⁹⁴Ir, ¹⁹⁸Au. ¹⁹⁹Au, ²¹¹At, ²¹²Pb, ²¹²Bi, ²¹³Bi, ²²³Ra, ²⁵⁵Fm, ²²⁷Th, ¹⁷⁷Lu, ⁶²Cu, ⁶⁴Cu, ⁶⁷Ga, ⁶⁸Ga, ⁸⁶Y, ⁸⁹Zr, and ¹¹¹In.

6. The immunoconjugate of claim 1, wherein the therapeutic moiety is a cytotoxic agent comprising ²²⁵Ac.

7. The immunoconjugate of claim 1, wherein the therapeutic moiety is an imaging agent comprising ¹¹¹In.

8. The immunoconjugate according to claim 4, wherein the therapeutic moiety comprises a radiometal complex, wherein the radiometal complex comprises the radiometal bound to a chelator, and wherein the chelator is conjugated to the antigen binding domain with binding specificity for kallikrein related peptidase 2 (hK2).

9. The immunoconjugate according to claim 8, wherein the chelator is 1,4,7,10-tetraazacyclododecane-1,4,7,10, tetraacetic acid (DOTA), S-2-(4-isothiocyanatobenzyl)-1,4,7-triazacyclononane-1,4,7-triacetic acid (NOTA), 1,4,8,11-tetraazacyclodocedan-1,4,8,11-tetraacetic acid (TETA), 3,6,9,15-tetraazabicyclo[9.3.1]-pentadeca-1 (15),11,13-triene-4-(S)-(4-isothiocyanatobenzyl)-3,6,9-triacetic acid (PCTA), 5-S-(4-aminobenzyl)-1-oxa-4,7,10-triazacyclododecane-4,7,10-tris(acetic acid) (DO3A), or a derivative thereof.

10. The immunoconjugate according to claim 8, wherein the chelator is DOTA.

11. The immunoconjugate according to claim 8, wherein the chelator is H₂bp18c6 or a H₂bp18c6 derivative.

12. The immunoconjugate according to claim 8, wherein the radiometal complex is a radiometal complex of Formula (I-m), or Formula (II-m), or Formula (III-m),
wherein the radiometal complex of Formula (I-m) has the following structure: [chemical structure]
wherein:
M is the radiometal;
each of ring A and ring B is independently a 6-10 membered aryl or a 5-10 membered heteroaryl, wherein each of ring A and ring B is optionally substituted with one or more substituents independently selected from the group consisting of halo, alkyl, alkenyl, cycloalkyl, cycloalkenyl, aryl, heterocyclyl, heteroaryl, —OR₁₃, —SR₁₃,,
(CH₂)ₚCOOR₁₃, —OC(O)R₁₃, —N(R₁₃)₂, —CON(R₁₃)₂, —NO₂, —CN—OC(O)N(R₁₃)₂, and X;
each of Z₁ and Z₂ is independently —(C(R₁₂)₂)ₘ—or —(CH₂)ₙ—C(R₁₂)(X)—(CH₂)ₙ—;
each X is independently —L₁-R₁₁;
each n is independently 0, 1, 2, 3, 4, or 5;
each m is independently 1, 2, 3, 4, or 5;
each p is independently 0 or 1;
L₁is absent or a linker;
R₁₁ comprises the antigen binding domain with binding specificity for kallikrein related peptidase 2 (hK2);
each R₁₂ is independently hydrogen, alkyl, cycloalkyl, aryl, heterocyclyl, or heteroaryl;
each R₁₃ is independently hydrogen or alkyl;
each of R₁₄, R₁₅, R₁₆, and Rivis independently hydrogen, alkyl, or X,
or alternatively R₁₄ and R₁₅ and/or R₁₆ and R₁₇ are taken together with the carbon atoms to which they are attached to form a 5- or 6-membered cycloalkyl ring optionally substituted with X; provided that the radiometal complex comprises at least one X, and when X is present on ring A or ring B, L₁ is a linker or at least one of R₁₂ and R₁₄—R₁₇ is not hydrogen;
wherein the radiometal complex of Formula (II-m) has the following structure: [chemical structure]
wherein;
M is the radiometal;
A₁ is N or CRI or is absent;
A₂ is N or CR₂;
A₃ is N or CR₃;
A₄ is N or CR₄;
A₅ is N or CR₅;
A₆ is N or CR₆ or is absent;
A₇ is N or CR₇;
A₈ is N or CR₈;
A₉ is N or CR₉;
A₁₀ is N or CR₁₀;
provided that no more than three of A₁, A₂, A₃, A₄, and As are N, and no more than three of A₆, A₇, A₈, A₉, and A₁₀ are N;
each of R₁, R₂, R₃, R₄, R₅, R₆, R₇, R₈, R₉, and R₁₀ is independently selected from the group consisting of hydrogen, halo, alkyl, alkenyl, cycloalkyl, cycloalkenyl, aryl, heterocyclyl, heteroaryl, —OR₁₃, —SR₁₃, —(CH₂)ₚCOOR₁₃, —OC(O)R₁₃, —N(R₁₃)₂, —CON(R₁₃)₂, —NO₂, —CN—OC(O)N(R₁₃)₂, and —X,
or, alternatively, any two directly adjacent R₁, R₂, R₃, R₄, R₅, R₆, R₇, R₈, R₉, and R₁₀ are taken together with the atoms to which they are attached to form a five or six-membered substituted or unsubstituted carbocyclic or nitrogen-containing ring;
each of Z₁ and Z₂ is independently —(C(R₁₂)₂)ₘ—or —(CH₂)ₙ—C(R₁₂)(X)—(CH₂)ₙ—;
each X is independently —L₁-R₁₁;
each n is independently 0, 1, 2, 3, 4, or 5;
each m is independently 1, 2, 3, 4, or 5;
each p is independently 0 or 1;
L₁is absent or a linker;
R₁₁ comprises the antigen binding domain with binding specificity for kallikrein related peptidase 2 (hK2);
each R₁₂ is independently hydrogen, alkyl, cycloalkyl, aryl, heterocyclyl, or heteroaryl;
each R₁₃ is independently hydrogen or alkyl;
each of R₁₄, R₁₅, R₁₆, and R₁₇ is independently hydrogen, alkyl, or X,
or alternatively R₁₄ and R₁₅ and/or R₁₆ and R₁₇ are taken together with the carbon atoms to which they are attached to form a 5- or 6-membered cycloalkyl ring optionally substituted with X;
provided that the radiometal complex comprises at least one X, and when any one of R₁, R₂, R₃, R₄, R₅, R₆, R₇, R₈, R₉, and R₁₀ is X, then L₁ is a linker or at least one of R₁₂ and R₁₄—R₁ z is not hydrogen;
wherein the radiometal complex of Formula (III-m) has the following structure: [chemical structure]
wherein;
M is the radiometal;
each An is independently O, S, NMe, or NH;
each of Z₁ and Z₂ is independently —(C(R₁₂)₂)ₘ—or —(CH₂)ₙ—C(R₁₂)(X)—(CH₂)ₙ—;
each X is independently —L₁-R₁₁;
each n is independently 0, 1, 2, 3, 4, or 5;
each m is independently 1, 2, 3, 4, or 5;
each p is independently 0 or 1;
L₁ is absent or a linker;
R₁₁ comprises the antigen binding domain with binding specificity for kallikrein related peptidase 2 (hK2);
each R₁₂ is independently hydrogen, alkyl, cycloalkyl, aryl, heterocyclyl, or heteroaryl;
each R₁₃ is independently hydrogen or alkyl;
each of R₁₄, R₁₅, R₁₆, and R₁₇ is independently hydrogen, alkyl, or X, or alternatively R₁₄ and R₁₅ and/or R₁₆ and R₁₇ are taken together with the carbon atoms to which they are attached to form a 5- or 6-membered cycloalkyl ring optionally substituted with X; and
each R₁₈ is independently selected from the group consisting of hydrogen, halo, alkyl, alkenyl, cycloalkyl, cycloalkenyl, aryl, heterocyclyl, heteroaryl, —OR₁₃, —SR₁₃, —(CH₂)ₚCOOR₁₃, —OC(O)R₁₃, —N(R₁₃)₂, —CON(R₁₃)₂, —NO₂, —CN—OC(O)N(R₁₃)₂, and —X,
provided that the radiometal complex comprises at least one X, and when R₁₈ is X, then L₁ is a linker or at least one of R₁₂ and R₁₄—R₁₇ is not hydrogen.

13. The immunoconjugate according to claim 8, wherein the radiometal complex is a radiometal complex of Formula (IV-m), or Formula (V-m), or Formula (VI-m),
wherein the radiometal complex of Formula (IV-m) has the following structure: [chemical structure]
or a pharmaceutically acceptable salt thereof, wherein;
M⁺ is the radiometal;
R₁ is hydrogen and R₂ is —L₁-R₄;
alternatively, R₁ is —L₁-R₄ and R₂ is hydrogen;
R₃ is hydrogen;
alternatively, R₂ and R₃ are taken together with the carbon atoms to which they are attached to form a 5- or 6-membered cycloalkyl, wherein the 5- or 6-membered cycloalkyl is optionally substituted with-L₁-R₄;
L₁ is absent or a linker;
R₄ comprises the antigen binding domain with binding specificity for kallikrein related peptidase 2 (hK2);
wherein the radiometal complex of Formula (V-m) has the following structure: [chemical structure]
or a pharmaceutically acceptable salt thereof, wherein;
M⁺ is the radiometal
L₁ is absent or a linker;
R₄ comprises the antigen binding domain with binding specificity for kallikrein related peptidase 2 (hK2);
wherein the radiometal complex of Formula (VI-m) has the following structure: [chemical structure]
or a pharmaceutically acceptable salt thereof, wherein;
M⁺ is the radiometal;
L₁ is absent or a linker; and
R₄ comprises the antigen binding domain with binding specificity for kallikrein related peptidase 2 (hK2).

14. The immunoconjugate of claim 1, wherein the therapeutic moiety is an auristatin derivative.

15. The immunoconjugate of claim 14, wherein the therapeutic moiety is MMAE (monomethyl auristatin E).

16. The immunoconjugate of claim 14, wherein the therapeutic moiety is MMAF (monomethyl auristatin F).

17. The immunoconjugate according to claim 1, wherein the antigen binding domain that binds hK2 is a scFv, a (scFv)₂, a Fv, a Fab, a F(ab′)₂, a Fd, a dAb or a VHH.

18. The immunoconjugate according to claim 1, wherein the antigen binding domain with binding specificity for hK2 is a Fab.

19. The immunoconjugate according to claim 1, wherein the antigen binding domain comprises the HCDR1, the HCDR2, the HCDR3, the LCDR1, the LCDR2 and the LCDR3 of SEQ ID NOs: 170, 171, 172, 173, 174 and 175, respectively.

20. The immunoconjugate according to claim 1, wherein the antigen binding domain that binds hK2 comprises a VH which is at least 80% (e.g. at least 85%, at least 90%, at least 95%, at least 99% or 100%) identical to the VH of SEQ ID NO: 162 and a VL which is at least 80% (e.g. at least 85%, at least 90%, at least 95%, at least 99% or 100%) identical to the VL of SEQ ID NO: 163.

21. The immunoconjugate according to claim 1, wherein the antigen binding domain that binds hK2 comprises the VH of SEQ ID NO; 162 and the VL of SEQ ID NO: 163.

22. The immunoconjugate according to claim 1 +18, wherein the antigen binding domain is a Fab that comprises;
a. a HCDR1, a HCDR2, a HCDR3, a LCDR1, a LCDR2 and a LCDR3 of SEQ ID NOs: 170, 171, 172, 173, 174 and 175, respectively; and/or
b. a VH of SEQ ID NO: 162 and a VL of SEQ ID NO: 163.

23. The immunoconjugate according to claim 1, wherein the immunoconjugate is a short half-life immunoconjugate.

24. A method of treating an hK2-expressing cancer in a subject, comprising administering to the subject a therapeutically effective amount of the immunoconjugate according to claim 1.

25. A method of reducing the amount of hK2-expressing tumor cells in a subject, comprising administering the immunoconjugate according to claim 1 to the subject for a time sufficient to reduce the amount of hK2-expressing tumor cells.

26. A method of treating prostate cancer in a subject, comprising administering to the subject a therapeutically effective amount of the immunoconjugate according to claim 1.

27. The method of claim 26, wherein the prostate cancer is relapsed, refractory, malignant or castration resistant prostate cancer, or any combination thereof.

28. The method of claim 26, wherein the prostate cancer is metastatic castration-resistant prostate cancer.

29. A method of detecting the presence of prostate cancer in a subject, comprising administering the immunoconjugate according to claim 1 to a subject suspected to have prostate cancer and visualizing the biological structures to which the conjugate is bound, thereby detecting the presence of prostate cancer.

30. A method of making an immunoconjugate according to claim 1 comprising: conjugating the therapeutic moiety to the antigen binding domain with binding specificity for kallikrein related peptidase 2 (hK2).

31. A method of making a radioimmunoconjugate comprising binding a radiometal to a chelator that is conjugated to an antigen binding domain with binding specificity for kallikrein related peptidase 2 (hK2).

32. The method of claim 31, wherein the chelator is DOTA.

33. The method of claim 31, wherein the chelator is H₂bp18c6 or a H₂bp18c6 derivative.

34. The method of claim 31, wherein the chelator is selected from the group consisting of chelators of Formula (I), Formula (II) and Formula (III) as described herein, wherein R₁₁ comprises the antigen binding domain with binding specificity for kallikrein related peptidase 2 (hK2)

35. The method of claim 31, wherein the chelator is selected from the group consisting of chelators of Formula (IV), Formula (V) and Formula (VI) as described herein, wherein R₄ comprises the antigen binding domain with binding specificity for kallikrein related peptidase 2 (hK2).

36. The method according to claim 31, wherein the antigen binding domain that binds hK2 is a scFv, a (scFv)₂, a Fv, a Fab, a F(ab)₂, a Fd, a dAb or a VHH.

37. The method according to claim 31, wherein the antigen binding domain that binds hK2 is a Fab.

38. The method according to claim 31, wherein the antigen binding domain comprises the HCDR1, the HCDR2, the HCDR3, the LCDR1, the LCDR2 and the LCDR3 of SEQ ID NOs: 170, 171, 172, 173, 174 and 175, respectively.

39. The method according to claim 31, wherein the antigen binding domain that binds hK2 comprises a VH which is at least 80% (e.g. at least 85%, at least 90%, at least 95%, at least 99% or 100%) identical to the VH of SEQ ID NO: 162 and a VL which is at least 80% (e.g. at least 85%, at least 90%, at least 95%, at least 99% or 100%) identical to the VL of SEQ ID NO: 163.

40. The method according to claim 31, wherein the antigen binding domain that binds hK2 comprises the VH of SEQ ID NO: 162 and the VL of SEQ ID NO: 163.

41. The method according to claim 31, wherein the antigen binding domain is a Fab that comprises;
a. a HCDR1, a HCDR2, a HCDR3, a LCDR1, a LCDR2 and a LCDR3 of SEQ ID NOs: 170, 171, 172, 173, 174 and 175, respectively; and/or
b. a VH of SEQ ID NO: 162 and a VL of SEQ ID NO: 163.

42. The immunoconjugate according to claim 12, wherein M is an alpha-emitting radiometal ion.

43. The immunoconjugate according to claim 12, wherein M is actinium-225 (²²⁵Ac).

44. The immunoconjugate according to claim 13, wherein M⁺ is selected from the group consisting of actinium-225 (²²⁵Ac), radium-223 (²³³Ra), bismuth-213 (²¹³Bi), lead-212 (²¹²Pb(II) and/or ²¹²Pb(IV)), terbium-149 (¹⁴⁹Tb), terbium-152 (¹⁵²Tb), terbium-155 (¹⁵⁵Tb), fermium-255 (²⁵⁵Fm), thorium-227 (²²⁷Th), thorium-226 (²²⁶Th), astatine-211 (²¹¹At), cerium-134 (³⁴Ce), neodymium-144 (¹⁴⁴Nd), lanthanum-132 (¹³²La), lanthanum-135 (¹³⁵La), and uranium-230 (²³⁰U).

The application's sequence listing, which the Patent Office published only in electronic form, follows.

SEQUENCE LISTING (475 sequences)

SEQ ID NO: 1 - protein, 111 aa, Artificial Sequence
  Description of Artificial Sequence: Synthetic polypeptide
DIVLTQSPDSLAVSLGERATINCKASESVEYFGTSLMHWYQQKPGQPPKLLIYAASNRESGVPDRFSGSGSGTDFTLTIQSVQAEDVSVYFCQQTRKVPYTFGQGTKLEIK

SEQ ID NO: 2 - protein, 111 aa, Artificial Sequence
  Description of Artificial Sequence: Synthetic polypeptide
DIVLTQSPDSLAVSLGERATINCKASESVEYFGTSLMHWYQQKPGQPPKLLIYAASNRESGVPDRFSGSGSGTDFTLTISSLQAEDVAVYYCQQTRKVPYTFGQGTKLEIK

SEQ ID NO: 3 - protein, 111 aa, Artificial Sequence
  Description of Artificial Sequence: Synthetic polypeptide
DIVLTQSPDSLAVSLGERATINCKASESVEYFGTSLMHWYQQKPGQPPKLLIYAASNRESGVPDRFSGSGSGTDFTLTISSVQAEDVAVYYCQQTRKVPYTFGQGTKLEIK

SEQ ID NO: 4 - protein, 117 aa, Artificial Sequence
  Description of Artificial Sequence: Synthetic polypeptide
QVQLQESGPGLVKPSDTLSLTCAVSGNSITSDYAWNWIRQFPGKGLEWMGYISYSGSTTYNPSLKSRVTISRDTSKNQFSLKLSSVTPVDTAVYYCATGYYYGSGFWGQGTLVTVSS

SEQ ID NO: 5 - protein, 117 aa, Artificial Sequence
  Description of Artificial Sequence: Synthetic polypeptide
QVQLQESGPGLVKPSDTLSLTCAVSGNSITSDYAWNWIRQPPGKGLEWIGYISYSGSTTYNPSLKSRVTMSRDTSKNQFSLKLSSVTAVDTAVYYCATGYYYGSGFWGQGTLVTVSS

SEQ ID NO: 6 - protein, 117 aa, Artificial Sequence
  Description of Artificial Sequence: Synthetic polypeptide
QVQLQESGPGLVKPSDTLSLTCAVSGNSITSDYAWNWIRQFPGKGLEWIGYISYSGSTTYNPSLKSRVTISRDTSKNQFSLKLSSVTPVDTAVYYCATGYYYGSGFWGQGTLVTVSS

SEQ ID NO: 7 - protein, 20 aa, Artificial Sequence
  Description of Artificial Sequence: Synthetic peptide
GGSEGKSSGSGSESKSTGGS

SEQ ID NO: 8 - protein, 248 aa, Artificial Sequence
  Description of Artificial Sequence: Synthetic polypeptide
QVQLQESGPGLVKPSDTLSLTCAVSGNSITSDYAWNWIRQFPGKGLEWMGYISYSGSTTYNPSLKSRVTISRDTSKNQFSLKLSSVTPVDTAVYYCATGYYYGSGFWGQGTLVTVSSGGSEGKSSGSGSESKSTGGSDIVLTQSPDSLAVSLGERATINCKASESVEYFGTSLMHWYQQKPGQPPKLLIYAASNRESGVPDRFSGSGSGTDFTLTIQSVQAEDVSVYFCQQTRKVPYTFGQGTKLEIK

SEQ ID NO: 9 - protein, 248 aa, Artificial Sequence
  Description of Artificial Sequence: Synthetic polypeptide
QVQLQESGPGLVKPSDTLSLTCAVSGNSITSDYAWNWIRQFPGKGLEWMGYISYSGSTTYNPSLKSRVTISRDTSKNQFSLKLSSVTPVDTAVYYCATGYYYGSGFWGQGTLVTVSSGGSEGKSSGSGSESKSTGGSDIVLTQSPDSLAVSLGERATINCKASESVEYFGTSLMHWYQQKPGQPPKLLIYAASNRESGVPDRFSGSGSGTDFTLTISSLQAEDVAVYYCQQTRKVPYTFGQGTKLEIK

SEQ ID NO: 10 - protein, 248 aa, Artificial Sequence
  Description of Artificial Sequence: Synthetic polypeptide
QVQLQESGPGLVKPSDTLSLTCAVSGNSITSDYAWNWIRQFPGKGLEWIGYISYSGSTTYNPSLKSRVTISRDTSKNQFSLKLSSVTPVDTAVYYCATGYYYGSGFWGQGTLVTVSSGGSEGKSSGSGSESKSTGGSDIVLTQSPDSLAVSLGERATINCKASESVEYFGTSLMHWYQQKPGQPPKLLIYAASNRESGVPDRFSGSGSGTDFTLTISSVQAEDVAVYYCQQTRKVPYTFGQGTKLEIK

SEQ ID NO: 11 - protein, 248 aa, Artificial Sequence
  Description of Artificial Sequence: Synthetic polypeptide
QVQLQESGPGLVKPSDTLSLTCAVSGNSITSDYAWNWIRQFPGKGLEWMGYISYSGSTTYNPSLKSRVTISRDTSKNQFSLKLSSVTPVDTAVYYCATGYYYGSGFWGQGTLVTVSSGGSEGKSSGSGSESKSTGGSDIVLTQSPDSLAVSLGERATINCKASESVEYFGTSLMHWYQQKPGQPPKLLIYAASNRESGVPDRFSGSGSGTDFTLTISSVQAEDVAVYYCQQTRKVPYTFGQGTKLEIK

SEQ ID NO: 12 - protein, 248 aa, Artificial Sequence
  Description of Artificial Sequence: Synthetic polypeptide
DIVLTQSPDSLAVSLGERATINCKASESVEYFGTSLMHWYQQKPGQPPKLLIYAASNRESGVPDRFSGSGSGTDFTLTIQSVQAEDVSVYFCQQTRKVPYTFGQGTKLEIKGGSEGKSSGSGSESKSTGGSQVQLQESGPGLVKPSDTLSLTCAVSGNSITSDYAWNWIRQFPGKGLEWMGYISYSGSTTYNPSLKSRVTISRDTSKNQFSLKLSSVTPVDTAVYYCATGYYYGSGFWGQGTLVTVSS

SEQ ID NO: 13 - protein, 248 aa, Artificial Sequence
  Description of Artificial Sequence: Synthetic polypeptide
DIVLTQSPDSLAVSLGERATINCKASESVEYFGTSLMHWYQQKPGQPPKLLIYAASNRESGVPDRFSGSGSGTDFTLTISSLQAEDVAVYYCQQTRKVPYTFGQGTKLEIKGGSEGKSSGSGSESKSTGGSQVQLQESGPGLVKPSDTLSLTCAVSGNSITSDYAWNWIRQFPGKGLEWIGYISYSGSTTYNPSLKSRVTISRDTSKNQFSLKLSSVTPVDTAVYYCATGYYYGSGFWGQGTLVTVSS

SEQ ID NO: 14 - protein, 248 aa, Artificial Sequence
  Description of Artificial Sequence: Synthetic polypeptide
DIVLTQSPDSLAVSLGERATINCKASESVEYFGTSLMHWYQQKPGQPPKLLIYAASNRESGVPDRFSGSGSGTDFTLTISSLQAEDVAVYYCQQTRKVPYTFGQGTKLEIKGGSEGKSSGSGSESKSTGGSQVQLQESGPGLVKPSDTLSLTCAVSGNSITSDYAWNWIRQFPGKGLEWMGYISYSGSTTYNPSLKSRVTISRDTSKNQFSLKLSSVTPVDTAVYYCATGYYYGSGFWGQGTLVTVSS

SEQ ID NO: 15 - protein, 248 aa, Artificial Sequence
  Description of Artificial Sequence: Synthetic polypeptide
DIVLTQSPDSLAVSLGERATINCKASESVEYFGTSLMHWYQQKPGQPPKLLIYAASNRESGVPDRFSGSGSGTDFTLTISSVQAEDVAVYYCQQTRKVPYTFGQGTKLEIKGGSEGKSSGSGSESKSTGGSQVQLQESGPGLVKPSDTLSLTCAVSGNSITSDYAWNWIRQFPGKGLEWIGYISYSGSTTYNPSLKSRVTISRDTSKNQFSLKLSSVTPVDTAVYYCATGYYYGSGFWGQGTLVTVSS

SEQ ID NO: 16 - protein, 248 aa, Artificial Sequence
  Description of Artificial Sequence: Synthetic polypeptide
DIVLTQSPDSLAVSLGERATINCKASESVEYFGTSLMHWYQQKPGQPPKLLIYAASNRESGVPDRFSGSGSGTDFTLTISSVQAEDVAVYYCQQTRKVPYTFGQGTKLEIKGGSEGKSSGSGSESKSTGGSQVQLQESGPGLVKPSDTLSLTCAVSGNSITSDYAWNWIRQFPGKGLEWMGYISYSGSTTYNPSLKSRVTISRDTSKNQFSLKLSSVTPVDTAVYYCATGYYYGSGFWGQGTLVTVSS

SEQ ID NO: 17 - protein, 248 aa, Artificial Sequence
  Description of Artificial Sequence: Synthetic polypeptide
DIVLTQSPDSLAVSLGERATINCKASESVEYFGTSLMHWYQQKPGQPPKLLIYAASNRESGVPDRFSGSGSGTDFTLTIQSVQAEDVSVYFCQQTRKVPYTFGQGTKLEIKGGSEGKSSGSGSESKSTGGSQVQLQESGPGLVKPSDTLSLTCAVSGNSITSDYAWNWIRQFPGKGLEWIGYISYSGSTTYNPSLKSRVTISRDTSKNQFSLKLSSVTPVDTAVYYCATGYYYGSGFWGQGTLVTVSS

SEQ ID NO: 18 - protein, 248 aa, Artificial Sequence
  Description of Artificial Sequence: Synthetic polypeptide
QVQLQESGPGLVKPSDTLSLTCAVSGNSITSDYAWNWIRQPPGKGLEWIGYISYSGSTTYNPSLKSRVTMSRDTSKNQFSLKLSSVTAVDTAVYYCATGYYYGSGFWGQGTLVTVSSGGSEGKSSGSGSESKSTGGSDIVLTQSPDSLAVSLGERATINCKASESVEYFGTSLMHWYQQKPGQPPKLLIYAASNRESGVPDRFSGSGSGTDFTLTISSVQAEDVAVYYCQQTRKVPYTFGQGTKLEIK

SEQ ID NO: 19 - protein, 248 aa, Artificial Sequence
  Description of Artificial Sequence: Synthetic polypeptide
QVQLQESGPGLVKPSDTLSLTCAVSGNSITSDYAWNWIRQPPGKGLEWIGYISYSGSTTYNPSLKSRVTMSRDTSKNQFSLKLSSVTAVDTAVYYCATGYYYGSGFWGQGTLVTVSSGGSEGKSSGSGSESKSTGGSDIVLTQSPDSLAVSLGERATINCKASESVEYFGTSLMHWYQQKPGQPPKLLIYAASNRESGVPDRFSGSGSGTDFTLTIQSVQAEDVSVYFCQQTRKVPYTFGQGTKLEIK

SEQ ID NO: 20 - protein, 248 aa, Artificial Sequence
  Description of Artificial Sequence: Synthetic polypeptide
QVQLQESGPGLVKPSDTLSLTCAVSGNSITSDYAWNWIRQPPGKGLEWIGYISYSGSTTYNPSLKSRVTMSRDTSKNQFSLKLSSVTAVDTAVYYCATGYYYGSGFWGQGTLVTVSSGGSEGKSSGSGSESKSTGGSDIVLTQSPDSLAVSLGERATINCKASESVEYFGTSLMHWYQQKPGQPPKLLIYAASNRESGVPDRFSGSGSGTDFTLTISSLQAEDVAVYYCQQTRKVPYTFGQGTKLEIK

SEQ ID NO: 21 - protein, 248 aa, Artificial Sequence
  Description of Artificial Sequence: Synthetic polypeptide
DIVLTQSPDSLAVSLGERATINCKASESVEYFGTSLMHWYQQKPGQPPKLLIYAASNRESGVPDRFSGSGSGTDFTLTIQSVQAEDVSVYFCQQTRKVPYTFGQGTKLEIKGGSEGKSSGSGSESKSTGGSQVQLQESGPGLVKPSDTLSLTCAVSGNSITSDYAWNWIRQPPGKGLEWIGYISYSGSTTYNPSLKSRVTMSRDTSKNQFSLKLSSVTAVDTAVYYCATGYYYGSGFWGQGTLVTVSS

SEQ ID NO: 22 - protein, 248 aa, Artificial Sequence
  Description of Artificial Sequence: Synthetic polypeptide
DIVLTQSPDSLAVSLGERATINCKASESVEYFGTSLMHWYQQKPGQPPKLLIYAASNRESGVPDRFSGSGSGTDFTLTISSLQAEDVAVYYCQQTRKVPYTFGQGTKLEIKGGSEGKSSGSGSESKSTGGSQVQLQESGPGLVKPSDTLSLTCAVSGNSITSDYAWNWIRQPPGKGLEWIGYISYSGSTTYNPSLKSRVTMSRDTSKNQFSLKLSSVTAVDTAVYYCATGYYYGSGFWGQGTLVTVSS

SEQ ID NO: 23 - protein, 248 aa, Artificial Sequence
  Description of Artificial Sequence: Synthetic polypeptide
DIVLTQSPDSLAVSLGERATINCKASESVEYFGTSLMHWYQQKPGQPPKLLIYAASNRESGVPDRFSGSGSGTDFTLTISSVQAEDVAVYYCQQTRKVPYTFGQGTKLEIKGGSEGKSSGSGSESKSTGGSQVQLQESGPGLVKPSDTLSLTCAVSGNSITSDYAWNWIRQPPGKGLEWIGYISYSGSTTYNPSLKSRVTMSRDTSKNQFSLKLSSVTAVDTAVYYCATGYYYGSGFWGQGTLVTVSS

SEQ ID NO: 24 - protein, 19 aa, Artificial Sequence
  Description of Artificial Sequence: Synthetic peptide
MAWVWTLLFLMAAAQSIQA

SEQ ID NO: 25 - protein, 45 aa, Artificial Sequence
  Description of Artificial Sequence: Synthetic polypeptide
TSTPAPRPPTPAPTIASQPLSLRPEACRPAAGGAVHTRGLDFACD

SEQ ID NO: 26 - protein, 24 aa, Artificial Sequence
  Description of Artificial Sequence: Synthetic peptide
IYIWAPLAGTCGVLLLSLVITLYC

SEQ ID NO: 27 - protein, 42 aa, Homo sapiens
KRGRKKLLYIFKQPFMRPVQTTQEEDGCSCRFPEEEEGGCEL

SEQ ID NO: 28 - protein, 112 aa, Homo sapiens
RVKFSRSADAPAYKQGQNQLYNELNLGRREEYDVLDKRRGRDPEMGGKPRRKNPQEGLYNELQKDKMAEAYSEIGMKGERRRGKGHDGLYQGLSTATKDTYDALHMQALPPR

SEQ ID NO: 29 - protein, 267 aa, Artificial Sequence
  Description of Artificial Sequence: Synthetic polypeptide
MAWVWTLLFLMAAAQSIQAQVQLQESGPGLVKPSDTLSLTCAVSGNSITSDYAWNWIRQFPGKGLEWMGYISYSGSTTYNPSLKSRVTISRDTSKNQFSLKLSSVTPVDTAVYYCATGYYYGSGFWGQGTLVTVSSGGSEGKSSGSGSESKSTGGSDIVLTQSPDSLAVSLGERATINCKASESVEYFGTSLMHWYQQKPGQPPKLLIYAASNRESGVPDRFSGSGSGTDFTLTIQSVQAEDVSVYFCQQTRKVPYTFGQGTKLEIK

SEQ ID NO: 30 - protein, 267 aa, Artificial Sequence
  Description of Artificial Sequence: Synthetic polypeptide
MAWVWTLLFLMAAAQSIQAQVQLQESGPGLVKPSDTLSLTCAVSGNSITSDYAWNWIRQFPGKGLEWMGYISYSGSTTYNPSLKSRVTISRDTSKNQFSLKLSSVTPVDTAVYYCATGYYYGSGFWGQGTLVTVSSGGSEGKSSGSGSESKSTGGSDIVLTQSPDSLAVSLGERATINCKASESVEYFGTSLMHWYQQKPGQPPKLLIYAASNRESGVPDRFSGSGSGTDFTLTISSLQAEDVAVYYCQQTRKVPYTFGQGTKLEIK

SEQ ID NO: 31 - protein, 267 aa, Artificial Sequence
  Description of Artificial Sequence: Synthetic polypeptide
MAWVWTLLFLMAAAQSIQAQVQLQESGPGLVKPSDTLSLTCAVSGNSITSDYAWNWIRQFPGKGLEWIGYISYSGSTTYNPSLKSRVTISRDTSKNQFSLKLSSVTPVDTAVYYCATGYYYGSGFWGQGTLVTVSSGGSEGKSSGSGSESKSTGGSDIVLTQSPDSLAVSLGERATINCKASESVEYFGTSLMHWYQQKPGQPPKLLIYAASNRESGVPDRFSGSGSGTDFTLTISSVQAEDVAVYYCQQTRKVPYTFGQGTKLEIK

SEQ ID NO: 32 - protein, 267 aa, Artificial Sequence
  Description of Artificial Sequence: Synthetic polypeptide
MAWVWTLLFLMAAAQSIQAQVQLQESGPGLVKPSDTLSLTCAVSGNSITSDYAWNWIRQFPGKGLEWMGYISYSGSTTYNPSLKSRVTISRDTSKNQFSLKLSSVTPVDTAVYYCATGYYYGSGFWGQGTLVTVSSGGSEGKSSGSGSESKSTGGSDIVLTQSPDSLAVSLGERATINCKASESVEYFGTSLMHWYQQKPGQPPKLLIYAASNRESGVPDRFSGSGSGTDFTLTISSVQAEDVAVYYCQQTRKVPYTFGQGTKLEIK

SEQ ID NO: 33 - protein, 267 aa, Artificial Sequence
  Description of Artificial Sequence: Synthetic polypeptide
MAWVWTLLFLMAAAQSIQADIVLTQSPDSLAVSLGERATINCKASESVEYFGTSLMHWYQQKPGQPPKLLIYAASNRESGVPDRFSGSGSGTDFTLTIQSVQAEDVSVYFCQQTRKVPYTFGQGTKLEIKGGSEGKSSGSGSESKSTGGSQVQLQESGPGLVKPSDTLSLTCAVSGNSITSDYAWNWIRQFPGKGLEWMGYISYSGSTTYNPSLKSRVTISRDTSKNQFSLKLSSVTPVDTAVYYCATGYYYGSGFWGQGTLVTVSS

SEQ ID NO: 34 - protein, 267 aa, Artificial Sequence
  Description of Artificial Sequence: Synthetic polypeptide
MAWVWTLLFLMAAAQSIQADIVLTQSPDSLAVSLGERATINCKASESVEYFGTSLMHWYQQKPGQPPKLLIYAASNRESGVPDRFSGSGSGTDFTLTISSLQAEDVAVYYCQQTRKVPYTFGQGTKLEIKGGSEGKSSGSGSESKSTGGSQVQLQESGPGLVKPSDTLSLTCAVSGNSITSDYAWNWIRQFPGKGLEWIGYISYSGSTTYNPSLKSRVTISRDTSKNQFSLKLSSVTPVDTAVYYCATGYYYGSGFWGQGTLVTVSS

SEQ ID NO: 35 - protein, 267 aa, Artificial Sequence
  Description of Artificial Sequence: Synthetic polypeptide
MAWVWTLLFLMAAAQSIQADIVLTQSPDSLAVSLGERATINCKASESVEYFGTSLMHWYQQKPGQPPKLLIYAASNRESGVPDRFSGSGSGTDFTLTISSLQAEDVAVYYCQQTRKVPYTFGQGTKLEIKGGSEGKSSGSGSESKSTGGSQVQLQESGPGLVKPSDTLSLTCAVSGNSITSDYAWNWIRQFPGKGLEWMGYISYSGSTTYNPSLKSRVTISRDTSKNQFSLKLSSVTPVDTAVYYCATGYYYGSGFWGQGTLVTVSS

SEQ ID NO: 36 - protein, 267 aa, Artificial Sequence
  Description of Artificial Sequence: Synthetic polypeptide
MAWVWTLLFLMAAAQSIQADIVLTQSPDSLAVSLGERATINCKASESVEYFGTSLMHWYQQKPGQPPKLLIYAASNRESGVPDRFSGSGSGTDFTLTISSVQAEDVAVYYCQQTRKVPYTFGQGTKLEIKGGSEGKSSGSGSESKSTGGSQVQLQESGPGLVKPSDTLSLTCAVSGNSITSDYAWNWIRQFPGKGLEWIGYISYSGSTTYNPSLKSRVTISRDTSKNQFSLKLSSVTPVDTAVYYCATGYYYGSGFWGQGTLVTVSS

SEQ ID NO: 37 - protein, 267 aa, Artificial Sequence
  Description of Artificial Sequence: Synthetic polypeptide
MAWVWTLLFLMAAAQSIQADIVLTQSPDSLAVSLGERATINCKASESVEYFGTSLMHWYQQKPGQPPKLLIYAASNRESGVPDRFSGSGSGTDFTLTISSVQAEDVAVYYCQQTRKVPYTFGQGTKLEIKGGSEGKSSGSGSESKSTGGSQVQLQESGPGLVKPSDTLSLTCAVSGNSITSDYAWNWIRQFPGKGLEWMGYISYSGSTTYNPSLKSRVTISRDTSKNQFSLKLSSVTPVDTAVYYCATGYYYGSGFWGQGTLVTVSS

SEQ ID NO: 38 - protein, 267 aa, Artificial Sequence
  Description of Artificial Sequence: Synthetic polypeptide
MAWVWTLLFLMAAAQSIQADIVLTQSPDSLAVSLGERATINCKASESVEYFGTSLMHWYQQKPGQPPKLLIYAASNRESGVPDRFSGSGSGTDFTLTIQSVQAEDVSVYFCQQTRKVPYTFGQGTKLEIKGGSEGKSSGSGSESKSTGGSQVQLQESGPGLVKPSDTLSLTCAVSGNSITSDYAWNWIRQFPGKGLEWIGYISYSGSTTYNPSLKSRVTISRDTSKNQFSLKLSSVTPVDTAVYYCATGYYYGSGFWGQGTLVTVSS

SEQ ID NO: 39 - protein, 267 aa, Artificial Sequence
  Description of Artificial Sequence: Synthetic polypeptide
MAWVWTLLFLMAAAQSIQAQVQLQESGPGLVKPSDTLSLTCAVSGNSITSDYAWNWIRQPPGKGLEWIGYISYSGSTTYNPSLKSRVTMSRDTSKNQFSLKLSSVTAVDTAVYYCATGYYYGSGFWGQGTLVTVSSGGSEGKSSGSGSESKSTGGSDIVLTQSPDSLAVSLGERATINCKASESVEYFGTSLMHWYQQKPGQPPKLLIYAASNRESGVPDRFSGSGSGTDFTLTISSVQAEDVAVYYCQQTRKVPYTFGQGTKLEIK

SEQ ID NO: 40 - protein, 267 aa, Artificial Sequence
  Description of Artificial Sequence: Synthetic polypeptide
MAWVWTLLFLMAAAQSIQAQVQLQESGPGLVKPSDTLSLTCAVSGNSITSDYAWNWIRQPPGKGLEWIGYISYSGSTTYNPSLKSRVTMSRDTSKNQFSLKLSSVTAVDTAVYYCATGYYYGSGFWGQGTLVTVSSGGSEGKSSGSGSESKSTGGSDIVLTQSPDSLAVSLGERATINCKASESVEYFGTSLMHWYQQKPGQPPKLLIYAASNRESGVPDRFSGSGSGTDFTLTIQSVQAEDVSVYFCQQTRKVPYTFGQGTKLEIK

SEQ ID NO: 41 - protein, 267 aa, Artificial Sequence
  Description of Artificial Sequence: Synthetic polypeptide
MAWVWTLLFLMAAAQSIQAQVQLQESGPGLVKPSDTLSLTCAVSGNSITSDYAWNWIRQPPGKGLEWIGYISYSGSTTYNPSLKSRVTMSRDTSKNQFSLKLSSVTAVDTAVYYCATGYYYGSGFWGQGTLVTVSSGGSEGKSSGSGSESKSTGGSDIVLTQSPDSLAVSLGERATINCKASESVEYFGTSLMHWYQQKPGQPPKLLIYAASNRESGVPDRFSGSGSGTDFTLTISSLQAEDVAVYYCQQTRKVPYTFGQGTKLEIK

SEQ ID NO: 42 - protein, 267 aa, Artificial Sequence
  Description of Artificial Sequence: Synthetic polypeptide
MAWVWTLLFLMAAAQSIQADIVLTQSPDSLAVSLGERATINCKASESVEYFGTSLMHWYQQKPGQPPKLLIYAASNRESGVPDRFSGSGSGTDFTLTIQSVQAEDVSVYFCQQTRKVPYTFGQGTKLEIKGGSEGKSSGSGSESKSTGGSQVQLQESGPGLVKPSDTLSLTCAVSGNSITSDYAWNWIRQPPGKGLEWIGYISYSGSTTYNPSLKSRVTMSRDTSKNQFSLKLSSVTAVDTAVYYCATGYYYGSGFWGQGTLVTVSS

SEQ ID NO: 43 - protein, 267 aa, Artificial Sequence
  Description of Artificial Sequence: Synthetic polypeptide
MAWVWTLLFLMAAAQSIQADIVLTQSPDSLAVSLGERATINCKASESVEYFGTSLMHWYQQKPGQPPKLLIYAASNRESGVPDRFSGSGSGTDFTLTISSLQAEDVAVYYCQQTRKVPYTFGQGTKLEIKGGSEGKSSGSGSESKSTGGSQVQLQESGPGLVKPSDTLSLTCAVSGNSITSDYAWNWIRQPPGKGLEWIGYISYSGSTTYNPSLKSRVTMSRDTSKNQFSLKLSSVTAVDTAVYYCATGYYYGSGFWGQGTLVTVSS

SEQ ID NO: 44 - protein, 267 aa, Artificial Sequence
  Description of Artificial Sequence: Synthetic polypeptide
MAWVWTLLFLMAAAQSIQADIVLTQSPDSLAVSLGERATINCKASESVEYFGTSLMHWYQQKPGQPPKLLIYAASNRESGVPDRFSGSGSGTDFTLTISSVQAEDVAVYYCQQTRKVPYTFGQGTKLEIKGGSEGKSSGSGSESKSTGGSQVQLQESGPGLVKPSDTLSLTCAVSGNSITSDYAWNWIRQPPGKGLEWIGYISYSGSTTYNPSLKSRVTMSRDTSKNQFSLKLSSVTAVDTAVYYCATGYYYGSGFWGQGTLVTVSS

SEQ ID NO: 45 - protein, 154 aa, Artificial Sequence
  Description of Artificial Sequence: Synthetic polypeptide
KRGRKKLLYIFKQPFMRPVQTTQEEDGCSCRFPEEEEGGCELRVKFSRSADAPAYKQGQNQLYNELNLGRREEYDVLDKRRGRDPEMGGKPRRKNPQEGLYNELQKDKMAEAYSEIGMKGERRRGKGHDGLYQGLSTATKDTYDALHMQALPPR

SEQ ID NO: 46 - protein, 471 aa, Artificial Sequence
  Description of Artificial Sequence: Synthetic polypeptide
QVQLQESGPGLVKPSDTLSLTCAVSGNSITSDYAWNWIRQFPGKGLEWMGYISYSGSTTYNPSLKSRVTISRDTSKNQFSLKLSSVTPVDTAVYYCATGYYYGSGFWGQGTLVTVSSGGSEGKSSGSGSESKSTGGSDIVLTQSPDSLAVSLGERATINCKASESVEYFGTSLMHWYQQKPGQPPKLLIYAASNRESGVPDRFSGSGSGTDFTLTIQSVQAEDVSVYFCQQTRKVPYTFGQGTKLEIKTSTPAPRPPTPAPTIASQPLSLRPEACRPAAGGAVHTRGLDFACDIYIWAPLAGTCGVLLLSLVITLYCKRGRKKLLYIFKQPFMRPVQTTQEEDGCSCRFPEEEEGGCELRVKFSRSADAPAYKQGQNQLYNELNLGRREEYDVLDKRRGRDPEMGGKPRRKNPQEGLYNELQKDKMAEAYSEIGMKGERRRGKGHDGLYQGLSTATKDTYDALHMQALPPR

SEQ ID NO: 47 - protein, 471 aa, Artificial Sequence
  Description of Artificial Sequence: Synthetic polypeptide
QVQLQESGPGLVKPSDTLSLTCAVSGNSITSDYAWNWIRQFPGKGLEWMGYISYSGSTTYNPSLKSRVTISRDTSKNQFSLKLSSVTPVDTAVYYCATGYYYGSGFWGQGTLVTVSSGGSEGKSSGSGSESKSTGGSDIVLTQSPDSLAVSLGERATINCKASESVEYFGTSLMHWYQQKPGQPPKLLIYAASNRESGVPDRFSGSGSGTDFTLTISSLQAEDVAVYYCQQTRKVPYTFGQGTKLEIKTSTPAPRPPTPAPTIASQPLSLRPEACRPAAGGAVHTRGLDFACDIYIWAPLAGTCGVLLLSLVITLYCKRGRKKLLYIFKQPFMRPVQTTQEEDGCSCRFPEEEEGGCELRVKFSRSADAPAYKQGQNQLYNELNLGRREEYDVLDKRRGRDPEMGGKPRRKNPQEGLYNELQKDKMAEAYSEIGMKGERRRGKGHDGLYQGLSTATKDTYDALHMQALPPR

SEQ ID NO: 48 - protein, 471 aa, Artificial Sequence
  Description of Artificial Sequence: Synthetic polypeptide
QVQLQESGPGLVKPSDTLSLTCAVSGNSITSDYAWNWIRQFPGKGLEWIGYISYSGSTTYNPSLKSRVTISRDTSKNQFSLKLSSVTPVDTAVYYCATGYYYGSGFWGQGTLVTVSSGGSEGKSSGSGSESKSTGGSDIVLTQSPDSLAVSLGERATINCKASESVEYFGTSLMHWYQQKPGQPPKLLIYAASNRESGVPDRFSGSGSGTDFTLTISSVQAEDVAVYYCQQTRKVPYTFGQGTKLEIKTSTPAPRPPTPAPTIASQPLSLRPEACRPAAGGAVHTRGLDFACDIYIWAPLAGTCGVLLLSLVITLYCKRGRKKLLYIFKQPFMRPVQTTQEEDGCSCRFPEEEEGGCELRVKFSRSADAPAYKQGQNQLYNELNLGRREEYDVLDKRRGRDPEMGGKPRRKNPQEGLYNELQKDKMAEAYSEIGMKGERRRGKGHDGLYQGLSTATKDTYDALHMQALPPR

SEQ ID NO: 49 - protein, 471 aa, Artificial Sequence
  Description of Artificial Sequence: Synthetic polypeptide
QVQLQESGPGLVKPSDTLSLTCAVSGNSITSDYAWNWIRQFPGKGLEWMGYISYSGSTTYNPSLKSRVTISRDTSKNQFSLKLSSVTPVDTAVYYCATGYYYGSGFWGQGTLVTVSSGGSEGKSSGSGSESKSTGGSDIVLTQSPDSLAVSLGERATINCKASESVEYFGTSLMHWYQQKPGQPPKLLIYAASNRESGVPDRFSGSGSGTDFTLTISSVQAEDVAVYYCQQTRKVPYTFGQGTKLEIKTSTPAPRPPTPAPTIASQPLSLRPEACRPAAGGAVHTRGLDFACDIYIWAPLAGTCGVLLLSLVITLYCKRGRKKLLYIFKQPFMRPVQTTQEEDGCSCRFPEEEEGGCELRVKFSRSADAPAYKQGQNQLYNELNLGRREEYDVLDKRRGRDPEMGGKPRRKNPQEGLYNELQKDKMAEAYSEIGMKGERRRGKGHDGLYQGLSTATKDTYDALHMQALPPR

SEQ ID NO: 50 - protein, 471 aa, Artificial Sequence
  Description of Artificial Sequence: Synthetic polypeptide
DIVLTQSPDSLAVSLGERATINCKASESVEYFGTSLMHWYQQKPGQPPKLLIYAASNRESGVPDRFSGSGSGTDFTLTIQSVQAEDVSVYFCQQTRKVPYTFGQGTKLEIKGGSEGKSSGSGSESKSTGGSQVQLQESGPGLVKPSDTLSLTCAVSGNSITSDYAWNWIRQFPGKGLEWMGYISYSGSTTYNPSLKSRVTISRDTSKNQFSLKLSSVTPVDTAVYYCATGYYYGSGFWGQGTLVTVSSTSTPAPRPPTPAPTIASQPLSLRPEACRPAAGGAVHTRGLDFACDIYIWAPLAGTCGVLLLSLVITLYCKRGRKKLLYIFKQPFMRPVQTTQEEDGCSCRFPEEEEGGCELRVKFSRSADAPAYKQGQNQLYNELNLGRREEYDVLDKRRGRDPEMGGKPRRKNPQEGLYNELQKDKMAEAYSEIGMKGERRRGKGHDGLYQGLSTATKDTYDALHMQALPPR

SEQ ID NO: 51 - protein, 471 aa, Artificial Sequence
  Description of Artificial Sequence: Synthetic polypeptide
DIVLTQSPDSLAVSLGERATINCKASESVEYFGTSLMHWYQQKPGQPPKLLIYAASNRESGVPDRFSGSGSGTDFTLTISSLQAEDVAVYYCQQTRKVPYTFGQGTKLEIKGGSEGKSSGSGSESKSTGGSQVQLQESGPGLVKPSDTLSLTCAVSGNSITSDYAWNWIRQFPGKGLEWIGYISYSGSTTYNPSLKSRVTISRDTSKNQFSLKLSSVTPVDTAVYYCATGYYYGSGFWGQGTLVTVSSTSTPAPRPPTPAPTIASQPLSLRPEACRPAAGGAVHTRGLDFACDIYIWAPLAGTCGVLLLSLVITLYCKRGRKKLLYIFKQPFMRPVQTTQEEDGCSCRFPEEEEGGCELRVKFSRSADAPAYKQGQNQLYNELNLGRREEYDVLDKRRGRDPEMGGKPRRKNPQEGLYNELQKDKMAEAYSEIGMKGERRRGKGHDGLYQGLSTATKDTYDALHMQALPPR

SEQ ID NO: 52 - protein, 471 aa, Artificial Sequence
  Description of Artificial Sequence: Synthetic polypeptide
DIVLTQSPDSLAVSLGERATINCKASESVEYFGTSLMHWYQQKPGQPPKLLIYAASNRESGVPDRFSGSGSGTDFTLTISSLQAEDVAVYYCQQTRKVPYTFGQGTKLEIKGGSEGKSSGSGSESKSTGGSQVQLQESGPGLVKPSDTLSLTCAVSGNSITSDYAWNWIRQFPGKGLEWMGYISYSGSTTYNPSLKSRVTISRDTSKNQFSLKLSSVTPVDTAVYYCATGYYYGSGFWGQGTLVTVSSTSTPAPRPPTPAPTIASQPLSLRPEACRPAAGGAVHTRGLDFACDIYIWAPLAGTCGVLLLSLVITLYCKRGRKKLLYIFKQPFMRPVQTTQEEDGCSCRFPEEEEGGCELRVKFSRSADAPAYKQGQNQLYNELNLGRREEYDVLDKRRGRDPEMGGKPRRKNPQEGLYNELQKDKMAEAYSEIGMKGERRRGKGHDGLYQGLSTATKDTYDALHMQALPPR

SEQ ID NO: 53 - protein, 471 aa, Artificial Sequence
  Description of Artificial Sequence: Synthetic polypeptide
DIVLTQSPDSLAVSLGERATINCKASESVEYFGTSLMHWYQQKPGQPPKLLIYAASNRESGVPDRFSGSGSGTDFTLTISSVQAEDVAVYYCQQTRKVPYTFGQGTKLEIKGGSEGKSSGSGSESKSTGGSQVQLQESGPGLVKPSDTLSLTCAVSGNSITSDYAWNWIRQFPGKGLEWIGYISYSGSTTYNPSLKSRVTISRDTSKNQFSLKLSSVTPVDTAVYYCATGYYYGSGFWGQGTLVTVSSTSTPAPRPPTPAPTIASQPLSLRPEACRPAAGGAVHTRGLDFACDIYIWAPLAGTCGVLLLSLVITLYCKRGRKKLLYIFKQPFMRPVQTTQEEDGCSCRFPEEEEGGCELRVKFSRSADAPAYKQGQNQLYNELNLGRREEYDVLDKRRGRDPEMGGKPRRKNPQEGLYNELQKDKMAEAYSEIGMKGERRRGKGHDGLYQGLSTATKDTYDALHMQALPPR

SEQ ID NO: 54 - protein, 471 aa, Artificial Sequence
  Description of Artificial Sequence: Synthetic polypeptide
DIVLTQSPDSLAVSLGERATINCKASESVEYFGTSLMHWYQQKPGQPPKLLIYAASNRESGVPDRFSGSGSGTDFTLTISSVQAEDVAVYYCQQTRKVPYTFGQGTKLEIKGGSEGKSSGSGSESKSTGGSQVQLQESGPGLVKPSDTLSLTCAVSGNSITSDYAWNWIRQFPGKGLEWMGYISYSGSTTYNPSLKSRVTISRDTSKNQFSLKLSSVTPVDTAVYYCATGYYYGSGFWGQGTLVTVSSTSTPAPRPPTPAPTIASQPLSLRPEACRPAAGGAVHTRGLDFACDIYIWAPLAGTCGVLLLSLVITLYCKRGRKKLLYIFKQPFMRPVQTTQEEDGCSCRFPEEEEGGCELRVKFSRSADAPAYKQGQNQLYNELNLGRREEYDVLDKRRGRDPEMGGKPRRKNPQEGLYNELQKDKMAEAYSEIGMKGERRRGKGHDGLYQGLSTATKDTYDALHMQALPPR

SEQ ID NO: 55 - protein, 471 aa, Artificial Sequence
  Description of Artificial Sequence: Synthetic polypeptide
DIVLTQSPDSLAVSLGERATINCKASESVEYFGTSLMHWYQQKPGQPPKLLIYAASNRESGVPDRFSGSGSGTDFTLTIQSVQAEDVSVYFCQQTRKVPYTFGQGTKLEIKGGSEGKSSGSGSESKSTGGSQVQLQESGPGLVKPSDTLSLTCAVSGNSITSDYAWNWIRQFPGKGLEWIGYISYSGSTTYNPSLKSRVTISRDTSKNQFSLKLSSVTPVDTAVYYCATGYYYGSGFWGQGTLVTVSSTSTPAPRPPTPAPTIASQPLSLRPEACRPAAGGAVHTRGLDFACDIYIWAPLAGTCGVLLLSLVITLYCKRGRKKLLYIFKQPFMRPVQTTQEEDGCSCRFPEEEEGGCELRVKFSRSADAPAYKQGQNQLYNELNLGRREEYDVLDKRRGRDPEMGGKPRRKNPQEGLYNELQKDKMAEAYSEIGMKGERRRGKGHDGLYQGLSTATKDTYDALHMQALPPR

SEQ ID NO: 56 - protein, 471 aa, Artificial Sequence
  Description of Artificial Sequence: Synthetic polypeptide
QVQLQESGPGLVKPSDTLSLTCAVSGNSITSDYAWNWIRQPPGKGLEWIGYISYSGSTTYNPSLKSRVTMSRDTSKNQFSLKLSSVTAVDTAVYYCATGYYYGSGFWGQGTLVTVSSGGSEGKSSGSGSESKSTGGSDIVLTQSPDSLAVSLGERATINCKASESVEYFGTSLMHWYQQKPGQPPKLLIYAASNRESGVPDRFSGSGSGTDFTLTISSVQAEDVAVYYCQQTRKVPYTFGQGTKLEIKTSTPAPRPPTPAPTIASQPLSLRPEACRPAAGGAVHTRGLDFACDIYIWAPLAGTCGVLLLSLVITLYCKRGRKKLLYIFKQPFMRPVQTTQEEDGCSCRFPEEEEGGCELRVKFSRSADAPAYKQGQNQLYNELNLGRREEYDVLDKRRGRDPEMGGKPRRKNPQEGLYNELQKDKMAEAYSEIGMKGERRRGKGHDGLYQGLSTATKDTYDALHMQALPPR

SEQ ID NO: 57 - protein, 471 aa, Artificial Sequence
  Description of Artificial Sequence: Synthetic polypeptide
QVQLQESGPGLVKPSDTLSLTCAVSGNSITSDYAWNWIRQPPGKGLEWIGYISYSGSTTYNPSLKSRVTMSRDTSKNQFSLKLSSVTAVDTAVYYCATGYYYGSGFWGQGTLVTVSSGGSEGKSSGSGSESKSTGGSDIVLTQSPDSLAVSLGERATINCKASESVEYFGTSLMHWYQQKPGQPPKLLIYAASNRESGVPDRFSGSGSGTDFTLTIQSVQAEDVSVYFCQQTRKVPYTFGQGTKLEIKTSTPAPRPPTPAPTIASQPLSLRPEACRPAAGGAVHTRGLDFACDIYIWAPLAGTCGVLLLSLVITLYCKRGRKKLLYIFKQPFMRPVQTTQEEDGCSCRFPEEEEGGCELRVKFSRSADAPAYKQGQNQLYNELNLGRREEYDVLDKRRGRDPEMGGKPRRKNPQEGLYNELQKDKMAEAYSEIGMKGERRRGKGHDGLYQGLSTATKDTYDALHMQALPPR

SEQ ID NO: 58 - protein, 471 aa, Artificial Sequence
  Description of Artificial Sequence: Synthetic polypeptide
QVQLQESGPGLVKPSDTLSLTCAVSGNSITSDYAWNWIRQPPGKGLEWIGYISYSGSTTYNPSLKSRVTMSRDTSKNQFSLKLSSVTAVDTAVYYCATGYYYGSGFWGQGTLVTVSSGGSEGKSSGSGSESKSTGGSDIVLTQSPDSLAVSLGERATINCKASESVEYFGTSLMHWYQQKPGQPPKLLIYAASNRESGVPDRFSGSGSGTDFTLTISSLQAEDVAVYYCQQTRKVPYTFGQGTKLEIKTSTPAPRPPTPAPTIASQPLSLRPEACRPAAGGAVHTRGLDFACDIYIWAPLAGTCGVLLLSLVITLYCKRGRKKLLYIFKQPFMRPVQTTQEEDGCSCRFPEEEEGGCELRVKFSRSADAPAYKQGQNQLYNELNLGRREEYDVLDKRRGRDPEMGGKPRRKNPQEGLYNELQKDKMAEAYSEIGMKGERRRGKGHDGLYQGLSTATKDTYDALHMQALPPR

SEQ ID NO: 59 - protein, 471 aa, Artificial Sequence
  Description of Artificial Sequence: Synthetic polypeptide
DIVLTQSPDSLAVSLGERATINCKASESVEYFGTSLMHWYQQKPGQPPKLLIYAASNRESGVPDRFSGSGSGTDFTLTIQSVQAEDVSVYFCQQTRKVPYTFGQGTKLEIKGGSEGKSSGSGSESKSTGGSQVQLQESGPGLVKPSDTLSLTCAVSGNSITSDYAWNWIRQPPGKGLEWIGYISYSGSTTYNPSLKSRVTMSRDTSKNQFSLKLSSVTAVDTAVYYCATGYYYGSGFWGQGTLVTVSSTSTPAPRPPTPAPTIASQPLSLRPEACRPAAGGAVHTRGLDFACDIYIWAPLAGTCGVLLLSLVITLYCKRGRKKLLYIFKQPFMRPVQTTQEEDGCSCRFPEEEEGGCELRVKFSRSADAPAYKQGQNQLYNELNLGRREEYDVLDKRRGRDPEMGGKPRRKNPQEGLYNELQKDKMAEAYSEIGMKGERRRGKGHDGLYQGLSTATKDTYDALHMQALPPR

SEQ ID NO: 60 - protein, 471 aa, Artificial Sequence
  Description of Artificial Sequence: Synthetic polypeptide
DIVLTQSPDSLAVSLGERATINCKASESVEYFGTSLMHWYQQKPGQPPKLLIYAASNRESGVPDRFSGSGSGTDFTLTISSLQAEDVAVYYCQQTRKVPYTFGQGTKLEIKGGSEGKSSGSGSESKSTGGSQVQLQESGPGLVKPSDTLSLTCAVSGNSITSDYAWNWIRQPPGKGLEWIGYISYSGSTTYNPSLKSRVTMSRDTSKNQFSLKLSSVTAVDTAVYYCATGYYYGSGFWGQGTLVTVSSTSTPAPRPPTPAPTIASQPLSLRPEACRPAAGGAVHTRGLDFACDIYIWAPLAGTCGVLLLSLVITLYCKRGRKKLLYIFKQPFMRPVQTTQEEDGCSCRFPEEEEGGCELRVKFSRSADAPAYKQGQNQLYNELNLGRREEYDVLDKRRGRDPEMGGKPRRKNPQEGLYNELQKDKMAEAYSEIGMKGERRRGKGHDGLYQGLSTATKDTYDALHMQALPPR

SEQ ID NO: 61 - protein, 471 aa, Artificial Sequence
  Description of Artificial Sequence: Synthetic polypeptide
DIVLTQSPDSLAVSLGERATINCKASESVEYFGTSLMHWYQQKPGQPPKLLIYAASNRESGVPDRFSGSGSGTDFTLTISSVQAEDVAVYYCQQTRKVPYTFGQGTKLEIKGGSEGKSSGSGSESKSTGGSQVQLQESGPGLVKPSDTLSLTCAVSGNSITSDYAWNWIRQPPGKGLEWIGYISYSGSTTYNPSLKSRVTMSRDTSKNQFSLKLSSVTAVDTAVYYCATGYYYGSGFWGQGTLVTVSSTSTPAPRPPTPAPTIASQPLSLRPEACRPAAGGAVHTRGLDFACDIYIWAPLAGTCGVLLLSLVITLYCKRGRKKLLYIFKQPFMRPVQTTQEEDGCSCRFPEEEEGGCELRVKFSRSADAPAYKQGQNQLYNELNLGRREEYDVLDKRRGRDPEMGGKPRRKNPQEGLYNELQKDKMAEAYSEIGMKGERRRGKGHDGLYQGLSTATKDTYDALHMQALPPR

SEQ ID NO: 62 - protein, 261 aa, Homo sapiens
MWDLVLSIALSVGCTGAVPLIQSRIVGGWECEKHSQPWQVAVYSHGWAHCGGVLVHPQWVLTAAHCLKKNSQVWLGRHNLFEPEDTGQRVPVSHSFPHPLYNMSLLKHQSLRPDEDSSHDLMLLRLSEPAKITDVVKVLGLPTQEPALGTTCYASGWGSIEPEEFLRPRSLQCVSLHLLSNDMCARAYSEKVTEFMLCAGLWTGGKDTCGGDSGGPLVCNGVLQGITSWGPEPCALPEKPAVYTKVVHYRKWIKDTIAANP

SEQ ID NO: 63 - protein, 6 aa, Artificial Sequence
  Description of Artificial Sequence: Synthetic peptide
SDYAWN

SEQ ID NO: 64 - protein, 16 aa, Artificial Sequence
  Description of Artificial Sequence: Synthetic peptide
YISYSGSTTYSPSLKS

SEQ ID NO: 65 - protein, 16 aa, Artificial Sequence
  Description of Artificial Sequence: Synthetic peptide
YISYSGSTTYNPSLKS

SEQ ID NO: 66 - protein, 8 aa, Artificial Sequence
  Description of Artificial Sequence: Synthetic peptide
GYYYGSGF

SEQ ID NO: 67 - protein, 15 aa, Artificial Sequence
  Description of Artificial Sequence: Synthetic peptide
RASESVEYFGTSLMH

SEQ ID NO: 68 - protein, 15 aa, Artificial Sequence
  Description of Artificial Sequence: Synthetic peptide
KASESVEYFGTSLMH

SEQ ID NO: 69 - protein, 7 aa, Artificial Sequence
  Description of Artificial Sequence: Synthetic peptide
AASNVES

SEQ ID NO: 70 - protein, 7 aa, Artificial Sequence
  Description of Artificial Sequence: Synthetic peptide
AASNRES

SEQ ID NO: 71 - protein, 9 aa, Artificial Sequence
  Description of Artificial Sequence: Synthetic peptide
QQTRKVPYT

SEQ ID NO: 72 - protein, 11 aa, Artificial Sequence
  Description of Artificial Sequence: Synthetic peptide
GNSITSDYAWN

SEQ ID NO: 73 - protein, 9 aa, Artificial Sequence
  Description of Artificial Sequence: Synthetic peptide
YISYSGSTT

SEQ ID NO: 74 - protein, 112 aa, Artificial Sequence
  Description of Artificial Sequence: Synthetic polypeptide
  MOD_RES (1)..(1): D or E
  MOD_RES (9)..(9): D or A
  MOD_RES (10)..(10): S or T
  MOD_RES (12)..(12): A or S
  MOD_RES (13)..(13): V or L
  MOD_RES (15)..(15): L or P
  MOD_RES (21)..(21): I or L
  MOD_RES (22)..(22): N or S
  MOD_RES (24)..(24): R or K
  MOD_RES (49)..(49): K or R
  MOD_RES (58)..(58): V or R
  MOD_RES (62)..(62): V or I
  MOD_RES (64)..(64): A or D
  MOD_RES (80)..(80): Q or S
  MOD_RES (82)..(82): L or V
  MOD_RES (83)..(83): Q or E
  MOD_RES (85)..(85): P or A
  MOD_RES (88)..(88): F or V
  MOD_RES (89)..(89): A or S
  MOD_RES (92)..(92): Y or F
  MOD_RES (105)..(105): Q or G
  MOD_RES (109)..(109): L or V
XIVLTQSPXXLXXSXGERATXXCXASESVEYFGTSLMHWYQQKPGQPPXLLIYAASNXESGXPXRFSGSGSGTDFTLTIXSXXQXEDXXVYXCQQTRKVPYTFGXGTKXEIK

SEQ ID NO: 75 - protein, 117 aa, Artificial Sequence
  Description of Artificial Sequence: Synthetic polypeptide
  MOD_RES (16)..(16): D or Q
  MOD_RES (23)..(23): A or T
  MOD_RES (41)..(41): P or F
  MOD_RES (45)..(45): G or R
  MOD_RES (49)..(49): I or M
  MOD_RES (70)..(70): I or M
  MOD_RES (88)..(88): A or P
  MOD_RES (89)..(89): V or A
QVQLQESGPGLVKPSXTLSLTCXVSGNSITSDYAWNWIRQXPGKXLEWXGYISYSGSTTYNPSLKSRVTXSRDTSKNQFSLKLSSVTXXDTAVYYCATGYYYGSGFWGQGTLVTVSS

SEQ ID NO: 76 - protein, 8 aa, Artificial Sequence
  Description of Artificial Sequence: Synthetic peptide
GGGSGGGS

SEQ ID NO: 77 - protein, 12 aa, Artificial Sequence
  Description of Artificial Sequence: Synthetic peptide
GGGSGGGSGGGS

SEQ ID NO: 78 - protein, 16 aa, Artificial Sequence
  Description of Artificial Sequence: Synthetic peptide
GGGSGGGSGGGSGGGS

SEQ ID NO: 79 - protein, 20 aa, Artificial Sequence
  Description of Artificial Sequence: Synthetic peptide
GGGSGGGSGGGSGGGSGGGS

SEQ ID NO: 80 - protein, 15 aa, Artificial Sequence
  Description of Artificial Sequence: Synthetic peptide
GGGGSGGGGSGGGGS

SEQ ID NO: 81 - protein, 20 aa, Artificial Sequence
  Description of Artificial Sequence: Synthetic peptide
GGGGSGGGGSGGGGSGGGGS

SEQ ID NO: 82 - protein, 25 aa, Artificial Sequence
  Description of Artificial Sequence: Synthetic peptide
GGGGSGGGGSGGGGSGGGGSGGGGS

SEQ ID NO: 83 - protein, 18 aa, Artificial Sequence
  Description of Artificial Sequence: Synthetic peptide
GSTSGSGKPGSGEGSTKG

SEQ ID NO: 84 - protein, 14 aa, Artificial Sequence
  Description of Artificial Sequence: Synthetic peptide
IRPRAIGGSKPRVA

SEQ ID NO: 85 - protein, 15 aa, Artificial Sequence
  Description of Artificial Sequence: Synthetic peptide
GKGGSGKGGSGKGGS

SEQ ID NO: 86 - protein, 15 aa, Artificial Sequence
  Description of Artificial Sequence: Synthetic peptide
GGKGSGGKGSGGKGS

SEQ ID NO: 87 - protein, 15 aa, Artificial Sequence
  Description of Artificial Sequence: Synthetic peptide
GGGKSGGGKSGGGKS

SEQ ID NO: 88 - protein, 15 aa, Artificial Sequence
  Description of Artificial Sequence: Synthetic peptide
GKGKSGKGKSGKGKS

SEQ ID NO: 89 - protein, 15 aa, Artificial Sequence
  Description of Artificial Sequence: Synthetic peptide
GGGKSGGKGSGKGGS

SEQ ID NO: 90 - protein, 15 aa, Artificial Sequence
  Description of Artificial Sequence: Synthetic peptide
GKPGSGKPGSGKPGS

SEQ ID NO: 91 - protein, 20 aa, Artificial Sequence
  Description of Artificial Sequence: Synthetic peptide
GKPGSGKPGSGKPGSGKPGS

SEQ ID NO: 92 - protein, 20 aa, Artificial Sequence
  Description of Artificial Sequence: Synthetic peptide
GKGKSGKGKSGKGKSGKGKS

SEQ ID NO: 93 - protein, 14 aa, Artificial Sequence
  Description of Artificial Sequence: Synthetic peptide
STAGDTHLGGEDFD

SEQ ID NO: 94 - protein, 15 aa, Artificial Sequence
  Description of Artificial Sequence: Synthetic peptide
GEGGSGEGGSGEGGS

SEQ ID NO: 95 - protein, 15 aa, Artificial Sequence
  Description of Artificial Sequence: Synthetic peptide
GGEGSGGEGSGGEGS

SEQ ID NO: 96 - protein, 15 aa, Artificial Sequence
  Description of Artificial Sequence: Synthetic peptide
GEGESGEGESGEGES

SEQ ID NO: 97 - protein, 15 aa, Artificial Sequence
  Description of Artificial Sequence: Synthetic peptide
GGGESGGEGSGEGGS

SEQ ID NO: 98 - protein, 20 aa, Artificial Sequence
  Description of Artificial Sequence: Synthetic peptide
GEGESGEGESGEGESGEGES

SEQ ID NO: 99 - protein, 18 aa, Artificial Sequence
  Description of Artificial Sequence: Synthetic peptide
GSTSGSGKPGSGEGSTKG

SEQ ID NO: 100 - protein, 19 aa, Artificial Sequence
  Description of Artificial Sequence: Synthetic peptide
PRGASKSGSASQTGSAPGS

SEQ ID NO: 101 - protein, 19 aa, Artificial Sequence
  Description of Artificial Sequence: Synthetic peptide
GTAAAGAGAAGGAAAGAAG

SEQ ID NO: 102 - protein, 19 aa, Artificial Sequence
  Description of Artificial Sequence: Synthetic peptide
GTSGSSGSGSGGSGSGGGG

SEQ ID NO: 103 - protein, 20 aa, Artificial Sequence
  Description of Artificial Sequence: Synthetic peptide
GKPGSGKPGSGKPGSGKPGS

SEQ ID NO: 104 - protein, 4 aa, Artificial Sequence
  Description of Artificial Sequence: Synthetic peptide
GSGS

SEQ ID NO: 105 - protein, 10 aa, Artificial Sequence
  Description of Artificial Sequence: Synthetic peptide
APAPAPAPAP

SEQ ID NO: 106 - protein, 20 aa, Artificial Sequence
  Description of Artificial Sequence: Synthetic peptide
APAPAPAPAPAPAPAPAPAP

SEQ ID NO: 107 - protein, 32 aa, Artificial Sequence
  Description of Artificial Sequence: Synthetic polypeptide
AEAAAKEAAAKEAAAAKEAAAAKEAAAAKAAA

SEQ ID NO: 108 - protein, 16 aa, Artificial Sequence
  Description of Artificial Sequence: Synthetic peptide
GTEGKSSGSGSESKST

SEQ ID NO: 109 - protein, 231 aa, Artificial Sequence
  Description of Artificial Sequence: Synthetic polypeptide
EPKSSDKTHTCPPCPAPEAAGGPSVFLFPPKPKDTLMISRTPEVTCVVVSVSHEDPEVKFNWYVDGVEVHNAKTKPREEQYNSTYRVVSVLTVLHQDWLNGKEYKCKVSNKALPAPIEKTISKAKGQPREPQVYVYPPSREEMTKNQVSLTCLVKGFYPSDIAVEWESNGQPENNYKTTPPVLDSDGSFALVSKLTVDKSRWQQGNVFSCSVMHEALHNHYTQKSLSLSPG

SEQ ID NO: 110 - protein, 231 aa, Artificial Sequence
  Description of Artificial Sequence: Synthetic polypeptide
EPKSSDKTHTCPPCPAPEAAGGPSVFLFPPKPKDTLMISRTPEVTCVVVSVSHEDPEVKFNWYVDGVEVHNAKTKPREEQYNSTYRVVSVLTVLHQDWLNGKEYKCKVSNKALPAPIEKTISKAKGQPREPQVYVLPPSREEMTKNQVSLLCLVKGFYPSDIAVEWESNGQPENNYLTWPPVLDSDGSFFLYSKLTVDKSRWQQGNVFSCSVMHEALHNHYTQKSLSLSPG

SEQ ID NO: 111 - protein, 5 aa, Homo sapiens
KVTEF

SEQ ID NO: 112 - protein, 5 aa, Homo sapiens
HYRKW

SEQ ID NO: 113 - protein, 6 aa, Homo sapiens
SHGWAH

SEQ ID NO: 114 - protein, 15 aa, Homo sapiens
RHNLFEPEDTGQRVP

SEQ ID NO: 115 - protein, 9 aa, Homo sapiens
GWGSIEPEE

SEQ ID NO: 116 - protein, 7 aa, Artificial Sequence
  Description of Artificial Sequence: Synthetic peptide
NNNAAWS

SEQ ID NO: 117 - protein, 18 aa, Artificial Sequence
  Description of Artificial Sequence: Synthetic peptide
RTYYRSKWLYDYAVSVKS

SEQ ID NO: 118 - protein, 8 aa, Artificial Sequence
  Description of Artificial Sequence: Synthetic peptide
GYSSSFDY

SEQ ID NO: 119 - protein, 14 aa, Artificial Sequence
  Description of Artificial Sequence: Synthetic peptide
TGTSSNIGTYKFVS

SEQ ID NO: 120 - protein, 7 aa, Artificial Sequence
  Description of Artificial Sequence: Synthetic peptide
EVSKRPS

SEQ ID NO: 121 - protein, 10 aa, Artificial Sequence
  Description of Artificial Sequence: Synthetic peptide
VSYAGSGTLL

SEQ ID NO: 122 - protein, 120 aa, Artificial Sequence
  Description of Artificial Sequence: Synthetic polypeptide
QVQLQQSGPRLVRPSQTLSLTCAISGDSVFNNNAAWSWIRQSPSRGLEWLGRTYYRSKWLYDYAVSVKSRITVNPDTSRNQFTLQLNSVTPEDTALYYCARGYSSSFDYWGQGTLVTVSS

SEQ ID NO: 123 - protein, 110 aa, Artificial Sequence
  Description of Artificial Sequence: Synthetic polypeptide
QSALTQPASVSGSPGQSITISCTGTSSNIGTYKFVSWYQQHPDKAPKVLLYEVSKRPSGVSSRFSGSKSGNTASLTISGLQAEDQADYHCVSYAGSGTLLFGGGTKLTVL

SEQ ID NO: 124 - protein, 111 aa, Artificial Sequence
  Description of Artificial Sequence: Synthetic polypeptide
DIVLTQSPASLAVSLGQRATISCRASESVEYFGTSLMHWYRQKPGQPPKLLIYAASNVESGVPARFSGSGSGTDFSLNIQPVEEDDFSMYFCQQTRKVPYTFGGGTKLEIK

SEQ ID NO: 125 - protein, 117 aa, Artificial Sequence
  Description of Artificial Sequence: Synthetic polypeptide
DVQLQESGPGLVKPSQSLSLTCTVTGNSITSDYAWNWIRQFPGNRLEWMGYISYSGSTTYSPSLKSRFSITRDTSKNQFFLQLNSVTPEDTATYFCATGYYYGSGFWGQGTLVTVSS

SEQ ID NO: 126 - protein, 15 aa, Artificial Sequence
  Description of Artificial Sequence: Synthetic peptide
EPKSCDKTHTCPPCP

SEQ ID NO: 127 - protein, 12 aa, Artificial Sequence
  Description of Artificial Sequence: Synthetic peptide
ERKCCVECPPCP

SEQ ID NO: 128 - protein, 62 aa, Artificial Sequence
  Description of Artificial Sequence: Synthetic polypeptide
ELKTPLGDTTHTCPRCPEPKSCDTPPPCPRCPEPKSCDTPPPCPRCPEPKSCDTPPPCPRCP

SEQ ID NO: 129 - protein, 12 aa, Artificial Sequence
  Description of Artificial Sequence: Synthetic peptide
ESKYGPPCPSCP

SEQ ID NO: 130 - protein, 330 aa, Unknown [sequence omitted]

SEQ ID NO: 131 - protein, 326 aa, Unknown
  Description of Unknown: wild-type IgG2 sequence
ASTKGPSVFPLAPCSRSTSESTAALGCLVKDYFPEPVTVSWNSGALTSGVHTFPAVLQSSGLYSLSSVVTVPSSNFGTQTYTCNVDHKPSNTKVDKTVERKCCVECPPCPAPPVAGPSVFLFPPKPKDTLMISRTPEVTCVVVDVSHEDPEVQFNWYVDGVEVHNAKTKPREEQFNSTFRVVSVLTVVHQDWLNGKEYKCKVSNKGLPAPIEKTISKTKGQPREPQVYTLPPSREEMTKNQVSLTCLVKGFYPSDISVEWESNGQPENNYKTTPPMLDSDGSFFLYSKLTVDKSRWQQGNVFSCSVMHEALHNHYTQKSLSLSPGK

SEQ ID NO: 132 - protein, 327 aa, Unknown
  Description of Unknown: wild-type IgG4 sequence
ASTKGPSVFPLAPCSRSTSESTAALGCLVKDYFPEPVTVSWNSGALTSGVHTFPAVLQSSGLYSLSSVVTVPSSSLGTKTYTCNVDHKPSNTKVDKRVESKYGPPCPSCPAPEFLGGPSVFLFPPKPKDTLMISRTPEVTCVVVDVSQEDPEVQFNWYVDGVEVHNAKTKPREEQFNSTYRVVSVLTVLHQDWLNGKEYKCKVSNKGLPSSIEKTISKAKGQPREPQVYTLPPSQEEMTKNQVSLTCLVKGFYPSDIAVEWESNGQPENNYKTTPPVLDSDGSFFLYSRLTVDKSRWQEGNVFSCSVMHEALHNHYTQKSLSLSLGK

SEQ ID NO: 133 - protein, 251 aa, Artificial Sequence
  Description of Artificial Sequence: Synthetic polypeptide
EVQLVESGGGLVQPGGSLRLSCAASGFTFSSYWMTWVRQAPGKGLEWVANIKQDGSERYYVDSVKGRFTISRDNAKNSLYLQMNSLRAEDTAVYYCARDQNYDILTGHYGMDVWGQGTTVTVSSGGSEGKSSGSGSESKSTGGSEIVLTQSPSFLSASVGDRVTITCRASQGISSYLSWYQQKPGKAPKLLIYATSTLQSGVPSRFSGSGSGTEFTLTISSLQPEDFATYYCQQLNSYPRTFGQGTKVEIK

SEQ ID NO: 134 - protein, 251 aa, Artificial Sequence
  Description of Artificial Sequence: Synthetic polypeptide
EIVLTQSPSFLSASVGDRVTITCRASQGISSYLSWYQQKPGKAPKLLIYATSTLQSGVPSRFSGSGSGTEFTLTISSLQPEDFATYYCQQLNSYPRTFGQGTKVEIKGGSEGKSSGSGSESKSTGGSEVQLVESGGGLVQPGGSLRLSCAASGFTFSSYWMTWVRQAPGKGLEWVANIKQDGSERYYVDSVKGRFTISRDNAKNSLYLQMNSLRAEDTAVYYCARDQNYDILTGHYGMDVWGQGTTVTVSS

SEQ ID NO: 135 - protein, 248 aa, Artificial Sequence
  Description of Artificial Sequence: Synthetic polypeptide
QVQLQESGPGLVKPSQTLSLTCTVSGNSITSDYAWNWIRQFPGKRLEWIGYISYSGSTTYNPSLKSRVTISRDTSKNQFSLKLSSVTAADTAVYYCATGYYYGSGFWGQGTLVTVSSGGSEGKSSGSGSESKSTGGSEIVLTQSPATLSLSPGERATLSCRASESVEYFGTSLMHWYQQKPGQPPRLLIYAASNVESGIPARFSGSGSGTDFTLTISSVEPEDFAVYFCQQTRKVPYTFGGGTKVEIK

SEQ ID NO: 136 - protein, 248 aa, Artificial Sequence
  Description of Artificial Sequence: Synthetic polypeptide
EIVLTQSPATLSLSPGERATLSCRASESVEYFGTSLMHWYQQKPGQPPRLLIYAASNVESGIPARFSGSGSGTDFTLTISSVEPEDFAVYFCQQTRKVPYTFGGGTKVEIKGGSEGKSSGSGSESKSTGGSQVQLQESGPGLVKPSQTLSLTCTVSGNSITSDYAWNWIRQFPGKRLEWIGYISYSGSTTYNPSLKSRVTISRDTSKNQFSLKLSSVTAADTAVYYCATGYYYGSGFWGQGTLVTVSS

SEQ ID NO: 137 - protein, 124 aa, Artificial Sequence
  Description of Artificial Sequence: Synthetic polypeptide
EVQLVESGGGLVQPGGSLRLSCAASGFTFSSYWMTWVRQAPGKGLEWVANIKQDGSERYYVDSVKGRFTISRDNAKNSLYLQMNSLRAEDTAVYYCARDQNYDILTGHYGMDVWGQGTTVTVSS

SEQ ID NO: 138 - protein, 107 aa, Artificial Sequence
  Description of Artificial Sequence: Synthetic polypeptide
EIVLTQSPSFLSASVGDRVTITCRASQGISSYLSWYQQKPGKAPKLLIYATSTLQSGVPSRFSGSGSGTEFTLTISSLQPEDFATYYCQQLNSYPRTFGQGTKVEIK

SEQ ID NO: 139 - protein, 117 aa, Artificial Sequence
  Description of Artificial Sequence: Synthetic polypeptide
QVQLQESGPGLVKPSQTLSLTCTVSGNSITSDYAWNWIRQFPGKRLEWIGYISYSGSTTYNPSLKSRVTISRDTSKNQFSLKLSSVTAADTAVYYCATGYYYGSGFWGQGTLVTVSS

SEQ ID NO: 140 - protein, 111 aa, Artificial Sequence
  Description of Artificial Sequence: Synthetic polypeptide
EIVLTQSPATLSLSPGERATLSCRASESVEYFGTSLMHWYQQKPGQPPRLLIYAASNVESGIPARFSGSGSGTDFTLTISSVEPEDFAVYFCQQTRKVPYTFGGGTKVEIK

SEQ ID NO: 141 - protein, 5 aa, Artificial Sequence
  Description of Artificial Sequence: Synthetic peptide
SYWMT

SEQ ID NO: 142 - protein, 17 aa, Artificial Sequence
  Description of Artificial Sequence: Synthetic peptide
NIKQDGSERYYVDSVKG

SEQ ID NO: 143 - protein, 15 aa, Artificial Sequence
  Description of Artificial Sequence: Synthetic peptide
DQNYDILTGHYGMDV

SEQ ID NO: 144 - protein, 11 aa, Artificial Sequence
  Description of Artificial Sequence: Synthetic peptide
RASQGISSYLS

SEQ ID NO: 145 - protein, 7 aa, Artificial Sequence
  Description of Artificial Sequence: Synthetic peptide
ATSTLQS

SEQ ID NO: 146 - protein, 9 aa, Artificial Sequence
  Description of Artificial Sequence: Synthetic peptide
QQLNSYPRT

SEQ ID NO: 147 - protein, 10 aa, Artificial Sequence
  Description of Artificial Sequence: Synthetic peptide
GFTFSSYWMT

SEQ ID NO: 148 - protein, 10 aa, Artificial Sequence
  Description of Artificial Sequence: Synthetic peptide
NIKQDGSERY

SEQ ID NO: 149 - protein, 270 aa, Artificial Sequence
  Description of Artificial Sequence: Synthetic polypeptide
MAWVWTLLFLMAAAQSIQAEVQLVESGGGLVQPGGSLRLSCAASGFTFSSYWMTWVRQAPGKGLEWVANIKQDGSERYYVDSVKGRFTISRDNAKNSLYLQMNSLRAEDTAVYYCARDQNYDILTGHYGMDVWGQGTTVTVSSGGSEGKSSGSGSESKSTGGSEIVLTQSPSFLSASVGDRVTITCRASQGISSYLSWYQQKPGKAPKLLIYATSTLQSGVPSRFSGSGSGTEFTLTISSLQPEDFATYYCQQLNSYPRTFGQGTKVEIK

SEQ ID NO: 150 - protein, 270 aa, Artificial Sequence
  Description of Artificial Sequence: Synthetic polypeptide
MAWVWTLLFLMAAAQSIQAEIVLTQSPSFLSASVGDRVTITCRASQGISSYLSWYQQKPGKAPKLLIYATSTLQSGVPSRFSGSGSGTEFTLTISSLQPEDFATYYCQQLNSYPRTFGQGTKVEIKGGSEGKSSGSGSESKSTGGSEVQLVESGGGLVQPGGSLRLSCAASGFTFSSYWMTWVRQAPGKGLEWVANIKQDGSERYYVDSVKGRFTISRDNAKNSLYLQMNSLRAEDTAVYYCARDQNYDILTGHYGMDVWGQGTTVTVSS

SEQ ID NO: 151 - protein, 267 aa, Artificial Sequence
  Description of Artificial Sequence: Synthetic polypeptide
MAWVWTLLFLMAAAQSIQAQVQLQESGPGLVKPSQTLSLTCTVSGNSITSDYAWNWIRQFPGKRLEWIGYISYSGSTTYNPSLKSRVTISRDTSKNQFSLKLSSVTAADTAVYYCATGYYYGSGFWGQGTLVTVSSGGSEGKSSGSGSESKSTGGSEIVLTQSPATLSLSPGERATLSCRASESVEYFGTSLMHWYQQKPGQPPRLLIYAASNVESGIPARFSGSGSGTDFTLTISSVEPEDFAVYFCQQTRKVPYTFGGGTKVEIK

SEQ ID NO: 152 - protein, 267 aa, Artificial Sequence
  Description of Artificial Sequence: Synthetic polypeptide
MAWVWTLLFLMAAAQSIQAEIVLTQSPATLSLSPGERATLSCRASESVEYFGTSLMHWYQQKPGQPPRLLIYAASNVESGIPARFSGSGSGTDFTLTISSVEPEDFAVYFCQQTRKVPYTFGGGTKVEIKGGSEGKSSGSGSESKSTGGSQVQLQESGPGLVKPSQTLSLTCTVSGNSITSDYAWNWIRQFPGKRLEWIGYISYSGSTTYNPSLKSRVTISRDTSKNQFSLKLSSVTAADTAVYYCATGYYYGSGFWGQGTLVTVSS

SEQ ID NO: 153 - protein, 474 aa, Artificial Sequence
  Description of Artificial Sequence: Synthetic polypeptide
EVQLVESGGGLVQPGGSLRLSCAASGFTFSSYWMTWVRQAPGKGLEWVANIKQDGSERYYVDSVKGRFTISRDNAKNSLYLQMNSLRAEDTAVYYCARDQNYDILTGHYGMDVWGQGTTVTVSSGGSEGKSSGSGSESKSTGGSEIVLTQSPSFLSASVGDRVTITCRASQGISSYLSWYQQKPGKAPKLLIYATSTLQSGVPSRFSGSGSGTEFTLTISSLQPEDFATYYCQQLNSYPRTFGQGTKVEIKTSTPAPRPPTPAPTIASQPLSLRPEACRPAAGGAVHTRGLDFACDIYIWAPLAGTCGVLLLSLVITLYCKRGRKKLLYIFKQPFMRPVQTTQEEDGCSCRFPEEEEGGCELRVKFSRSADAPAYKQGQNQLYNELNLGRREEYDVLDKRRGRDPEMGGKPRRKNPQEGLYNELQKDKMAEAYSEIGMKGERRRGKGHDGLYQGLSTATKDTYDALHMQALPPR

SEQ ID NO: 154 - protein, 474 aa, Artificial Sequence
  Description of Artificial Sequence: Synthetic polypeptide
EIVLTQSPSFLSASVGDRVTITCRASQGISSYLSWYQQKPGKAPKLLIYATSTLQSGVPSRFSGSGSGTEFTLTISSLQPEDFATYYCQQLNSYPRTFGQGTKVEIKGGSEGKSSGSGSESKSTGGSEVQLVESGGGLVQPGGSLRLSCAASGFTFSSYWMTWVRQAPGKGLEWVANIKQDGSERYYVDSVKGRFTISRDNAKNSLYLQMNSLRAEDTAVYYCARDQNYDILTGHYGMDVWGQGTTVTVSSTSTPAPRPPTPAPTIASQPLSLRPEACRPAAGGAVHTRGLDFACDIYIWAPLAGTCGVLLLSLVITLYCKRGRKKLLYIFKQPFMRPVQTTQEEDGCSCRFPEEEEGGCELRVKFSRSADAPAYKQGQNQLYNELNLGRREEYDVLDKRRGRDPEMGGKPRRKNPQEGLYNELQKDKMAEAYSEIGMKGERRRGKGHDGLYQGLSTATKDTYDALHMQALPPR

SEQ ID NO: 155 - protein, 471 aa, Artificial Sequence
  Description of Artificial Sequence: Synthetic polypeptide
QVQLQESGPGLVKPSQTLSLTCTVSGNSITSDYAWNWIRQFPGKRLEWIGYISYSGSTTYNPSLKSRVTISRDTSKNQFSLKLSSVTAADTAVYYCATGYYYGSGFWGQGTLVTVSSGGSEGKSSGSGSESKSTGGSEIVLTQSPATLSLSPGERATLSCRASESVEYFGTSLMHWYQQKPGQPPRLLIYAASNVESGIPARFSGSGSGTDFTLTISSVEPEDFAVYFCQQTRKVPYTFGGGTKVEIKTSTPAPRPPTPAPTIASQPLSLRPEACRPAAGGAVHTRGLDFACDIYIWAPLAGTCGVLLLSLVITLYCKRGRKKLLYIFKQPFMRPVQTTQEEDGCSCRFPEEEEGGCELRVKFSRSADAPAYKQGQNQLYNELNLGRREEYDVLDKRRGRDPEMGGKPRRKNPQEGLYNELQKDKMAEAYSEIGMKGERRRGKGHDGLYQGLSTATKDTYDALHMQALPPR

SEQ ID NO: 156 - protein, 471 aa, Artificial Sequence
  Description of Artificial Sequence: Synthetic polypeptide
EIVLTQSPATLSLSPGERATLSCRASESVEYFGTSLMHWYQQKPGQPPRLLIYAASNVESGIPARFSGSGSGTDFTLTISSVEPEDFAVYFCQQTRKVPYTFGGGTKVEIKGGSEGKSSGSGSESKSTGGSQVQLQESGPGLVKPSQTLSLTCTVSGNSITSDYAWNWIRQFPGKRLEWIGYISYSGSTTYNPSLKSRVTISRDTSKNQFSLKLSSVTAADTAVYYCATGYYYGSGFWGQGTLVTVSSTSTPAPRPPTPAPTIASQPLSLRPEACRPAAGGAVHTRGLDFACDIYIWAPLAGTCGVLLLSLVITLYCKRGRKKLLYIFKQPFMRPVQTTQEEDGCSCRFPEEEEGGCELRVKFSRSADAPAYKQGQNQLYNELNLGRREEYDVLDKRRGRDPEMGGKPRRKNPQEGLYNELQKDKMAEAYSEIGMKGERRRGKGHDGLYQGLSTATKDTYDALHMQALPPR

SEQ ID NO: 157 - protein, 107 aa, Artificial Sequence
  Description of Artificial Sequence: Synthetic polypeptide
  MOD_RES (4)..(4): L or M
  MOD_RES (9)..(9): G or S
  MOD_RES (10)..(10): I or S
  MOD_RES (13)..(13): V or A
  MOD_RES (15)..(15): P or V
  MOD_RES (17)..(17): E or D
  MOD_RES (20)..(20): S or T
  MOD_RES (21)..(21): F or I
  MOD_RES (22)..(22): S or T
  MOD_RES (40)..(40): T or P
  MOD_RES (41)..(41): N or G
  MOD_RES (42)..(42): G or K
  MOD_RES (43)..(43): S or A
  MOD_RES (45)..(45): R or K
  MOD_RES (49)..(49): K or Y
  MOD_RES (58)..(58): I or V
  MOD_RES (76)..(76): N or S
  MOD_RES (78)..(78): V or L
  MOD_RES (80)..(80): S or P
  MOD_RES (83)..(83): I or F
  MOD_RES (85)..(85): D or T
  MOD_RES (92)..(92): N or G
  MOD_RES (100)..(100): G or Q
DIQXTQSPXXLSXSXGXRVXXXCRARQSIGTAIHWYQQKXXXXPXLLIXYASESISGXPSRFSGSGSGTDFTLTIXSXQXEDXAXYYCQQSXSWPYTFGXGTKLEIK

SEQ ID NO: 158 - protein, 330 aa, Artificial Sequence
  Description of Artificial Sequence: Synthetic polypeptide
ASTKGPSVFPLAPSSKSTSGGTAALGCLVKDYFPEPVTVSWNSGALTSGVHTFPAVLQSSGLYSLSSVVTVPSSSLGTQTYICNVNHKPSNTKVDKKVEPKSCDKTHTCPPCPAPEAAGGPSVFLFPPKPKDTLMISRTPEVTCVVVSVSHEDPEVKFNWYVDGVEVHNAKTKPREEQYNSTYRVVSVLTVLHQDWLNGKEYKCKVSNKALPAPIEKTISKAKGQPREPQVYVYPPSREEMTKNQVSLTCLVKGFYPSDIAVEWESNGQPENNYKTTPPVLDSDGSFALVSKLTVDKSRWQQGNVFSCSVMHEALHNHYTQKSLSLSPGK

SEQ ID NO: 159 - protein, 117 aa, Artificial Sequence
  Description of Artificial Sequence: Synthetic polypeptide
QVQLQESGPGLVKPSQTLSLTCTVSGNSITSDYAWNWIRQFPGKGLEWIGYISYSGSTTYNPSLKSRVTISRDTSKNQFSLKLSSVTAADTAVYYCATGYYYGSGFWGQGTLVTVSS

SEQ ID NO: 160 - protein, 111 aa, Artificial Sequence
  Description of Artificial Sequence: Synthetic polypeptide
DIVLTQSPDSLAVSLGERATINCRASESVEYFGTSLMHWYQQKPGQPPKLLIYAASNVESGVPDRFSGSGSGTDFTLTISSLQAEDVAVYFCQQTRKVPYTFGGGTKVEIK

SEQ ID NO: 161 - protein, 117 aa, Artificial Sequence
  Description of Artificial Sequence: Synthetic polypeptide
QVQLQESGPGLVKPSQTLSLTCTVSGNSITSDYAWNWIRQPPGKGLEWIGYISYSGSTTYNPSLKSRVTISRDTSKNQFSLKLSSVTAADTAVYYCATGYYYGSGFWGQGTLVTVSS

SEQ ID NO: 162 - protein, 125 aa, Artificial Sequence
  Description of Artificial Sequence: Synthetic polypeptide
QVQLQESGPGLVKPSETLSLTCTVSGGSISSYYWSWIRQPPGKGLEWIGYIYYSGSTNYNPSLKSRVTISVDTSKNQFSLKLSSVTAADTAVYYCAGTTIFGVVTPNFYYGMDVWGQGTTVTVSS

SEQ ID NO: 163 - protein, 107 aa, Artificial Sequence
  Description of Artificial Sequence: Synthetic polypeptide
DIQMTQSPSFLSASVGDRVTITCRASQGISSYLAWYQQKPGKAPKFLIYAASTLQSGVPSRFSGSGSGTEFTLTISSLQPEDFATYYCQQLNSYPLTFGGGTKVEIK

SEQ ID NO: 164 - protein, 123 aa, Artificial Sequence
  Description of Artificial Sequence: Synthetic polypeptide
EVQLVESGGGVVQPGRSLRLSCVASGFTFSSYDIHWVRQAPGKGLEWVAIISYDGSKKDYTDSVKGRFTISRDNSKNTLYLQMDSLRVEDSAVYSCARESGWSHYYYYGMDVWGQGTMVTVSS

SEQ ID NO: 165 - protein, 107 aa, Artificial Sequence
  Description of Artificial Sequence: Synthetic polypeptide
DIVMTQSPSSLSASVGDRVTITCRASQDISNYLAWYQQKPGKVPKFLIYAASTLHSGVPSRFSGSGSGTDFTLTISSLQPEDVATYYCQKYNSAPYTFGQGTRLEIK

SEQ ID NO: 166 - protein, 119 aa, Artificial Sequence
  Description of Artificial Sequence: Synthetic polypeptide
QVQLQESGPGLVKPSETLSLTCTVSGGSISSYYWSWLRQPAGSGLEWIGRLYVSGFTNYNPSLKSRVTLSLDPSRNQLSLKLSSVTAADTAVYYCAGDSGNYWGWFDPWGQGTLVTVSS

SEQ ID NO: 167 - protein, 106 aa, Artificial Sequence
  Description of Artificial Sequence: Synthetic polypeptide
SYELTQPPSVSVSPGETASITCSGDQLGENYACWYQQKPGQSPVLVIYQDSKRPSGIPERFSGSNSGNTATLTISGTQALDEADYYCQAWDNSIVVFGGGTKLTVL

SEQ ID NO: 168 - protein, 121 aa, Artificial Sequence
  Description of Artificial Sequence: Synthetic polypeptide
QVQLVESGGGVVQPGRSLRLSCAASGFTFSYYGMHWVRQAPGKGLEWVAFISYDGSNKYYADSVKGRFTISRDNSKNTLYLQMNSLRAEDTAVYYCAHLPYSGSYWAFDYWGQGTQVTVSS

SEQ ID NO: 169 - protein, 108 aa, Artificial Sequence
  Description of Artificial Sequence: Synthetic polypeptide
QSVLTQPPSVSVAPGQTASITCGGDNIGSKSVHWYQQKPGQAPVLVVYDNSDRPSGIPERFSGSNSGTTATLTISRVEAGDEADYYCQVWDSSSDHPVVFGGGTKVTV

SEQ ID NO: 170 - protein, 5 aa, Artificial Sequence
  Description of Artificial Sequence: Synthetic peptide
SYYWS

SEQ ID NO: 171 - protein, 16 aa, Artificial Sequence
  Description of Artificial Sequence: Synthetic peptide
YIYYSGSTNYNPSLKS

SEQ ID NO: 172 - protein, 17 aa, Artificial Sequence
  Description of Artificial Sequence: Synthetic peptide
TTIFGVVTPNFYYGMDV

SEQ ID NO: 173 - protein, 11 aa, Artificial Sequence
  Description of Artificial Sequence: Synthetic peptide
RASQGISSYLA

SEQ ID NO: 174 - protein, 7 aa, Artificial Sequence
  Description of Artificial Sequence: Synthetic peptide
AASTLQS

SEQ ID NO: 175 - protein, 9 aa, Artificial Sequence
  Description of Artificial Sequence: Synthetic peptide
QQLNSYPLT

SEQ ID NO: 176 - protein, 5 aa, Artificial Sequence
  Description of Artificial Sequence: Synthetic peptide
SYDIH

SEQ ID NO: 177 - protein, 17 aa, Artificial Sequence
  Description of Artificial Sequence: Synthetic peptide
IISYDGSKKDYTDSVKG

SEQ ID NO: 178 - protein, 14 aa, Artificial Sequence
  Description of Artificial Sequence: Synthetic peptide
ESGWSHYYYYGMDV

SEQ ID NO: 179 - protein, 11 aa, Artificial Sequence
  Description of Artificial Sequence: Synthetic peptide
RASQDISNYLA

SEQ ID NO: 180 - protein, 7 aa, Artificial Sequence
  Description of Artificial Sequence: Synthetic peptide
AASTLHS

SEQ ID NO: 181 - protein, 9 aa, Artificial Sequence
  Description of Artificial Sequence: Synthetic peptide
QKYNSAPYT

SEQ ID NO: 182 - protein, 11 aa, Artificial Sequence
  Description of Artificial Sequence: Synthetic peptide
GGNNIGSKSVH

SEQ ID NO: 183 - protein, 16 aa, Artificial Sequence
  Description of Artificial Sequence: Synthetic peptide
RLYVSGFTNYNPSLKS

SEQ ID NO: 184 - protein, 11 aa, Artificial Sequence
  Description of Artificial Sequence: Synthetic peptide
DSGNYWGWFDP

SEQ ID NO: 185 - protein, 11 aa, Artificial Sequence
  Description of Artificial Sequence: Synthetic peptide
SGDQLGENYAC

SEQ ID NO: 186 - protein, 7 aa, Artificial Sequence
  Description of Artificial Sequence: Synthetic peptide
QDSKRPS

SEQ ID NO: 187 - protein, 9 aa, Artificial Sequence
  Description of Artificial Sequence: Synthetic peptide
QAWDNSIVV

SEQ ID NO: 188 - protein, 5 aa, Artificial Sequence
  Description of Artificial Sequence: Synthetic peptide
YYGMH

SEQ ID NO: 189 - protein, 17 aa, Artificial Sequence
  Description of Artificial Sequence: Synthetic peptide
FISYDGSNKYYADSVKG

SEQ ID NO: 190 - protein, 12 aa, Artificial Sequence
  Description of Artificial Sequence: Synthetic peptide
LPYSGSYWAFDY

SEQ ID NO: 191 - protein, 11 aa, Artificial Sequence
  Description of Artificial Sequence: Synthetic peptide
GGDNIGSKSVH

SEQ ID NO: 192 - protein, 7 aa, Artificial Sequence
  Description of Artificial Sequence: Synthetic peptide
DNSDRPS

SEQ ID NO: 193 - protein, 12 aa, Artificial Sequence
  Description of Artificial Sequence: Synthetic peptide
QVWDSSSDHPVV

SEQ ID NO: 194 - protein, 10 aa, Artificial Sequence
  Description of Artificial Sequence: Synthetic peptide
GGSISSYYWS

SEQ ID NO: 195 - protein, 9 aa, Artificial Sequence
  Description of Artificial Sequence: Synthetic peptide
YIYYSGSTN

SEQ ID NO: 196 - protein, 10 aa, Artificial Sequence
  Description of Artificial Sequence: Synthetic peptide
GFTFSSYDIH

SEQ ID NO: 197 - protein, 10 aa, Artificial Sequence
  Description of Artificial Sequence: Synthetic peptide
IISYDGSKKD

SEQ ID NO: 198 - protein, 10 aa, Artificial Sequence
  Description of Artificial Sequence: Synthetic peptide
GGSISSYYWS

SEQ ID NO: 199 - protein, 9 aa, Artificial Sequence
  Description of Artificial Sequence: Synthetic peptide
RLYVSGFTN

SEQ ID NO: 200 - protein, 7 aa, Artificial Sequence
  Description of Artificial Sequence: Synthetic peptide
GFTFSYY

SEQ ID NO: 201 - protein, 10 aa, Artificial Sequence
  Description of Artificial Sequence: Synthetic peptide
FISYDGSNKY

SEQ ID NO: 202 - protein, 447 aa, Artificial Sequence
  Description of Artificial Sequence: Synthetic polypeptide
DVQLQESGPGLVKPSQSLSLTCTVTGNSITSDYAWNWIRQFPGNRLEWMGYISYSGSTTYSPSLKSRFSITRDTSKNQFFLQLNSVTPEDTATYFCATGYYYGSGFWGQGTLVTVSSAKTTAPSVYPLAPVCGDTTGSSVTLGCLVKGYFPEPVTLTWNSGSLSSGVHTFPAVLQSDLYTLSSSVTVTSSTWPSQSITCNVAHPASSTKVDKKIEPRGPTIKPCPPCKCPAPNLLGGPSVFIFPPKIKDVLMISLSPIVTCVVVDVSEDDPDVQISWFVNNVEVHTAQTQTHREDYNSTLRVVSALPIQHQDWMSGKEFKCKVNNKDLPAPIERTISKPKGSVRAPQVYVLPPPEEEMTKKQVTLTCMVTDFMPEDIYVEWTNNGKTELNYKNTEPVLDSDGSYFMYSKLRVEKKNWVERNSYSCSVVHEGLHNHHTTKSFSRTPGK

SEQ ID NO: 203 - protein, 447 aa, Artificial Sequence
  Description of Artificial Sequence: Synthetic polypeptide
QVQLQESGPGLVKPSDTLSLTCAVSGNSITSDYAWNWIRQPPGKGLEWIGYISYSGSTTYNPSLKSRVTMSRDTSKNQFSLKLSSVTAVDTAVYYCATGYYYGSGFWGQGTLVTVSSASTKGPSVFPLAPSSKSTSGGTAALGCLVKDYFPEPVTVSWNSGALTSGVHTFPAVLQSSGLYSLSSVVTVPSSSLGTQTYICNVNHKPSNTKVDKKVEPKSCDKTHTCPPCPAPELLGGPSVFLFPPKPKDTLMISRTPEVTCVVVDVSHEDPEVKFNWYVDGVEVHNAKTKPREEQYNSTYRVVSVLTVLHQDWLNGKEYKCKVSNKALPAPIEKTISKAKGQPREPQVYTLPPSREEMTKNQVSLTCLVKGFYPSDIAVEWESNGQPENNYKTTPPVLDSDGSFFLYSKLTVDKSRWQQGNVFSCSVMHEALHNHYTQKSLSLSPGK

SEQ ID NO: 204 - protein, 125 aa, Artificial Sequence
  Description of Artificial Sequence: Synthetic polypeptide
QVQLVESGGGLVQPGGSLRLSCAASGFTFSHYAMSWVRQAPGKGLEWVSTIGGSGGSTYYADSVKGRFTISRDNSKNTLYLQMNSLRAEDTAVYYCAKPHIVMVTALLYDGMDVWGQGTMVTVSS

SEQ ID NO: 205 - protein, 108 aa, Artificial Sequence
  Description of Artificial Sequence: Synthetic polypeptide
SSELTQPPSVSVAPGQTARITCGGNNIGSKSVHWYQQKPGQAPVLVVYDDSDRPSGIPERFSGSNSGNTATLTISRVEAGDEADYYCQVWDSSSDHVVFGGGTKLTVL

SEQ ID NO: 206 - protein, 5 aa, Artificial Sequence
  Description of Artificial Sequence: Synthetic peptide
HYAMS

SEQ ID NO: 207 - protein, 17 aa, Artificial Sequence
  Description of Artificial Sequence: Synthetic peptide
TIGGSGGSTYYADSVKG

SEQ ID NO: 208 - protein, 16 aa, Artificial Sequence
  Description of Artificial Sequence: Synthetic peptide
PHIVMVTALLYDGMDV

SEQ ID NO: 209 - protein, 11 aa, Artificial Sequence
  Description of Artificial Sequence: Synthetic peptide
QVWDSSSDHVV

SEQ ID NO: 210 - protein, 452 aa, Artificial Sequence
  Description of Artificial Sequence: Synthetic polypeptide
QVQLQESGPGLVKPSETLSLTCTVSGGSISSYYWSWIRQPPGKGLEWIGYIYYSGSTNYNPSLKSRVTISVDTSKNQFSLKLSSVTAADTAVYYCAGTTIFGVVTPNFYYGMDVWGQGTTVTVSSASTKGPSVFPLAPCSRSTSESTAALGCLVKDYFPEPVTVSWNSGALTSGVHTFPAVLQSSGLYSLSSVVTVPSSSLGTKTYTCNVDHKPSNTKVDKRVESKYGPPCPPCPAPEAAGGPSVFLFPPKPKDTLMISRTPEVTCVVVDVSQEDPEVQFNWYVDGVEVHNAKTKPREEQFNSTYRVVSVLTVLHQDWLNGKEYKCKVSNKGLPSSIEKTISKAKGQPREPQVYTLPPSQEEMTKNQVSLTCLVKGFYPSDIAVEWESNGQPENNYKTTPPVLDSDGSFFLYSRLTVDKSRWQEGNVFSCSVMHEALHNHYTQKSLSLSLGK

SEQ ID NO: 211 - protein, 450 aa, Artificial Sequence
  Description of Artificial Sequence: Synthetic polypeptide
EVQLVESGGGVVQPGRSLRLSCVASGFTFSSYDIHWVRQAPGKGLEWVAIISYDGSKKDYTDSVKGRFTISRDNSKNTLYLQMDSLRVEDSAVYSCARESGWSHYYYYGMDVWGQGTMVTVSSASTKGPSVFPLAPCSRSTSESTAALGCLVKDYFPEPVTVSWNSGALTSGVHTFPAVLQSSGLYSLSSVVTVPSSSLGTKTYTCNVDHKPSNTKVDKRVESKYGPPCPPCPAPEAAGGPSVFLFPPKPKDTLMISRTPEVTCVVVDVSQEDPEVQFNWYVDGVEVHNAKTKPREEQFNSTYRVVSVLTVLHQDWLNGKEYKCKVSNKGLPSSIEKTISKAKGQPREPQVYTLPPSQEEMTKNQVSLTCLVKGFYPSDIAVEWESNGQPENNYKTTPPVLDSDGSFFLYSRLTVDKSRWQEGNVFSCSVMHEALHNHYTQKSLSLSLGK

SEQ ID NO: 212 - protein, 446 aa, Artificial Sequence
  Description of Artificial Sequence: Synthetic polypeptide
QVQLQESGPGLVKPSETLSLTCTVSGGSISSYYWSWLRQPAGSGLEWIGRLYVSGFTNYNPSLKSRVTLSLDPSRNQLSLKLSSVTAADTAVYYCAGDSGNYWGWFDPWGQGTLVTVSSASTKGPSVFPLAPCSRSTSESTAALGCLVKDYFPEPVTVSWNSGALTSGVHTFPAVLQSSGLYSLSSVVTVPSSSLGTKTYTCNVDHKPSNTKVDKRVESKYGPPCPPCPAPEAAGGPSVFLFPPKPKDTLMISRTPEVTCVVVDVSQEDPEVQFNWYVDGVEVHNAKTKPREEQFNSTYRVVSVLTVLHQDWLNGKEYKCKVSNKGLPSSIEKTISKAKGQPREPQVYTLPPSQEEMTKNQVSLTCLVKGFYPSDIAVEWESNGQPENNYKTTPPVLDSDGSFFLYSRLTVDKSRWQEGNVFSCSVMHEALHNHYTQKSLSLSLGK

SEQ ID NO: 213 - protein, 451 aa, Artificial Sequence
  Description of Artificial Sequence: Synthetic polypeptide
QVQLVESGGGVVQPGRSLRLSCAASGFTFSYYGMHWVRQAPGKGLEWVAFISYDGSNKYYADSVKGRFTISRDNSKNTLYLQMNSLRAEDTAVYYCAHLPYSGSYWAFDYWGQGTQVTVSSASTKGPSVFPLAPSSKSTSGGTAALGCLVKDYFPEPVTVSWNSGALTSGVHTFPAVLQSSGLYSLSSVVTVPSSSLGTQTYICNVNHKPSNTKVDKKVEPKSCDKTHTCPPCPAPEAAGGPSVFLFPPKPKDTLMISRTPEVTCVVVSVSHEDPEVKFNWYVDGVEVHNAKTKPREEQYNSTYRVVSVLTVLHQDWLNGKEYKCKVSNKALPAPIEKTISKAKGQPREPQVYTLPPSREEMTKNQVSLTCLVKGFYPSDIAVEWESNGQPENNYKTTPPVLDSDGSFFLYSKLTVDKSRWQQGNVFSCSVMHEALHNHYTQKSLSLSPGK

SEQ ID NO: 214 - protein, 218 aa, Artificial Sequence
  Description of Artificial Sequence: Synthetic polypeptide
DIVLTQSPASLAVSLGQRATISCRASESVEYFGTSLMHWYRQKPGQPPKLLIYAASNVESGVPARFSGSGSGTDFSLNIQPVEEDDFSMYFCQQTRKVPYTFGGGTKLEIKRADAAPTVSIFPPSSEQLTSGGASVVCFLNNFYPKDINVKWKIDGSERQNGVLNSWTDQDSKDSTYSMSSTLTLTKDEYERHNSYTCEATHKTSTSPIVKSFNRNEC

SEQ ID NO: 215 - protein, 218 aa, Artificial Sequence
  Description of Artificial Sequence: Synthetic polypeptide
DIVLTQSPDSLAVSLGERATINCKASESVEYFGTSLMHWYQQKPGQPPKLLIYAASNRESGVPDRFSGSGSGTDFTLTISSLQAEDVAVYYCQQTRKVPYTFGQGTKLEIKRTVAAPSVFIFPPSDEQLKSGTASVVCLLNNFYPREAKVQWKVDNALQSGNSQESVTEQDSKDSTYSLSSTLTLSKADYEKHKVYACEVTHQGLSSPVTKSFNRGEC

SEQ ID NO: 216 - protein, 10 aa, Artificial Sequence
  Description of Artificial Sequence: Synthetic peptide
GFTFSHYAMS

SEQ ID NO: 217 - protein, 11 aa, Artificial Sequence
  Description of Artificial Sequence: Synthetic peptide
TIGGSGGSTYY

SEQ ID NO: 218 - protein, 16 aa, Artificial Sequence
  Description of Artificial Sequence: Synthetic peptide
PHIVMVTALLYDGMDV

SEQ ID NO: 219 - protein, 455 aa, Artificial Sequence
  Description of Artificial Sequence: Synthetic polypeptide
QVQLVESGGGLVQPGGSLRLSCAASGFTFSHYAMSWVRQAPGKGLEWVSTIGGSGGSTYYADSVKGRFTISRDNSKNTLYLQMNSLRAEDTAVYYCAKPHIVMVTALLYDGMDVWGQGTMVTVSSASTKGPSVFPLAPSSKSTSGGTAALGCLVKDYFPEPVTVSWNSGALTSGVHTFPAVLQSSGLYSLSSVVTVPSSSLGTQTYICNVNHKPSNTKVDKKVEPKSCDKTHTCPPCPAPEAAGGPSVFLFPPKPKDTLMISRTPEVTCVVVSVSHEDPEVKFNWYVDGVEVHNAKTKPREEQYNSTYRVVSVLTVLHQDWLNGKEYKCKVSNKALPAPIEKTISKAKGQPREPQVYTLPPSREEMTKNQVSLTCLVKGFYPSDIAVEWESNGQPENNYKTTPPVLDSDGSFFLYSKLTVDKSRWQQGNVFSCSVMHEALHNHYTQKSLSLSPGK

SEQ ID NO: 220 - protein, 214 aa, Artificial Sequence
  Description of Artificial Sequence: Synthetic polypeptide
SSELTQPPSVSVAPGQTARITCGGNNIGSKSVHWYQQKPGQAPVLVVYDDSDRPSGIPERFSGSNSGNTATLTISRVEAGDEADYYCQVWDSSSDHVVFGGGTKLTVLGQPKAAPSVTLFPPSSEELQANKATLVCLISDFYPGAVTVAWKADSSPVKAGVETTTPSKQSNNKYAASSYLSLTPEQWKSHRSYSCQVTHEGSTVEKTVAPTECS

SEQ ID NO: 221 - protein, 214 aa, Artificial Sequence
  Description of Artificial Sequence: Synthetic polypeptide
DIQMTQSPSFLSASVGDRVTITCRASQGISSYLAWYQQKPGKAPKFLIYAASTLQSGVPSRFSGSGSGTEFTLTISSLQPEDFATYYCQQLNSYPLTFGGGTKVEIKRTVAAPSVFIFPPSDEQLKSGTASVVCLLNNFYPREAKVQWKVDNALQSGNSQESVTEQDSKDSTYSLSSTLTLSKADYEKHKVYACEVTHQGLSSPVTKSFNRGEC

SEQ ID NO: 222 - protein, 214 aa, Artificial Sequence
  Description of Artificial Sequence: Synthetic polypeptide
DIVMTQSPSSLSASVGDRVTITCRASQDISNYLAWYQQKPGKVPKFLIYAASTLHSGVPSRFSGSGSGTDFTLTISSLQPEDVATYYCQKYNSAPYTFGQGTRLEIKRTVAAPSVFIFPPSDEQLKSGTASVVCLLNNFYPREAKVQWKVDNALQSGNSQESVTEQDSKDSTYSLSSTLTLSKADYEKHKVYACEVTHQGLSSPVTKSFNRGEC

SEQ ID NO: 223 - protein, 212 aa, Artificial Sequence
  Description of Artificial Sequence: Synthetic polypeptide
SYELTQPPSVSVSPGETASITCSGDQLGENYACWYQQKPGQSPVLVIYQDSKRPSGIPERFSGSNSGNTATLTISGTQALDEADYYCQAWDNSIVVFGGGTKLTVLGQPKAAPSVTLFPPSSEELQANKATLVCLISDFYPGAVTVAWKADSSPVKAGVETTTPSKQSNNKYAASSYLSLTPEQWKSHRSYSCQVTHEGSTVEKTVAPTECS

SEQ ID NO: 224 - protein, 215 aa, Artificial Sequence
  Description of Artificial Sequence: Synthetic polypeptide
QSVLTQPPSVSVAPGQTASITCGGDNIGSKSVHWYQQKPGQAPVLVVYDNSDRPSGIPERFSGSNSGTTATLTISRVEAGDEADYYCQVWDSSSDHPVVFGGGTKVTVLGQPKAAPSVTLFPPSSEELQANKATLVCLISDFYPGAVTVAWKADSSPVKAGVETTTPSKQSNNKYAASSYLSLTPEQWKSHRSYSCQVTHEGSTVEKTVAPTECS

SEQ ID NO: 225 - DNA, 351 bp, Artificial Sequence
  Description of Artificial Sequence: Synthetic polynucleotide
gatgtgcagcttcaggagtctggacccggacttgttaaaccaagtcagtctctgtccctgacctgtaccgtcaccggcaacagcatcacaagcgattacgcatggaactggatcaggcagttccctggaaatcgactcgaatggatgggctacatttcatactccggttcaaccacttactctccatccttgaaatctaggttcagcatcacccgtgatacctcaaagaaccaattttttctgcaactgaatagcgtaactccagaggacacagccacatatttctgcgccactgggtattactatggctcaggtttctggggtcagggcactctcgtcaccgtcagcagc

SEQ ID NO: 226 - DNA, 351 bp, Artificial Sequence
  Description of Artificial Sequence: Synthetic polynucleotide
caggtccaactgcaagagagcggaccgggcctggtaaagccatccgacacattgtccctgacgtgtgcggtaagtggaaactctatcactagcgactatgcgtggaattggataagacaaccgccgggcaaggggctggaatggataggatatatcagctattccggttctacgacatacaatccttccctgaaaagcagagtcactatgtcacgcgacacgtccaagaatcagttctcattgaaattgtcatccgtaacggccgttgacactgcggtttattattgcgcaaccggatattactacggctctggtttttggggacagggaacacttgttactgttagttca

SEQ ID NO: 227 - DNA, 351 bp, Artificial Sequence
  Description of Artificial Sequence: Synthetic polynucleotide
caggtgcagctgcaggagagcggcccaggcctggtgaagccaagcgacaccctgagcctgacctgcgccgtgagcggcaacagcatcaccagcgactacgcctggaactggatccgccagttcccaggcaagggcctggagtggatcggctacatcagctacagcggcagcaccacctacaacccaagcctgaagagccgcgtcaccatcagccgcgacaccagcaagaaccagttcagcctgaagctgagcagcgtgacccctgtggacaccgccgtgtactactgcgccaccggctactactacggcagcggcttctggggccagggcaccctggtgaccgtgagcagc

SEQ ID NO: 228 - DNA, 351 bp, Artificial Sequence
  Description of Artificial Sequence: Synthetic polynucleotide
caggtgcagctgcaggagagcggcccaggcctggtgaagccaagcgacaccctgagcctgacctgcgccgtgagcggcaacagcatcaccagcgactacgcctggaactggatccgccagttcccaggcaagggcctggagtggatgggctacatcagctacagcggcagcaccacctacaacccaagcctgaagagccgcgtcaccatcagccgcgacaccagcaagaaccagttcagcctgaagctgagcagcgtgacccctgtggacaccgccgtgtactactgcgccaccggctactactacggcagcggcttctggggccagggcaccctggtgaccgtgagcagc

SEQ ID NO: 229 - DNA, 351 bp, Artificial Sequence
  Description of Artificial Sequence: Synthetic polynucleotide
caggttcagctgcaagagtctggaccaggcctggtcaagccctctcagaccctgtctctgacctgtaccgtgtccggcaactccatcacctctgactacgcctggaactggattcggcagttccctggcaagggccttgagtggatcggctacatctcctactccggttccaccacctacaaccccagcctgaagtcccgggtcaccatctcccgcgacacctccaagaaccagttctccctgaagctgtcctccgtgaccgctgctgataccgccgtgtactactgtgccaccggctactactacggctccggcttttggggacagggcacactggttaccgtgtctagt

SEQ ID NO: 230 - DNA, 351 bp, Artificial Sequence
  Description of Artificial Sequence: Synthetic polynucleotide
caggttcagctgcaagagtctggaccaggcctggtcaagccctctcagaccctgtctctgacctgtaccgtgtccggcaactccatcacctctgactacgcctggaactggattcggcagccacctggcaagggccttgagtggatcggctacatctcctactccggttccaccacctacaaccccagcctgaagtcccgggtcaccatctcccgcgacacctccaagaaccagttctccctgaagctgtcctccgtgaccgctgctgataccgccgtgtactactgtgccaccggctactactacggctccggcttttggggacagggcacactggttaccgtgtctagt

SEQ ID NO: 231 - DNA, 351 bp, Artificial Sequence
  Description of Artificial Sequence: Synthetic polynucleotide
caggttcagctgcaagagtctggaccaggcctggtcaagccctctcagaccctgtctctgacctgtaccgtgtccggcaactccatcacctctgactacgcctggaactggattcggcagttccctggcaagcgccttgagtggatcggctacatctcctactccggttccaccacctacaaccccagcctgaagtcccgggtcaccatctcccgcgacacctccaagaaccagttctccctgaagctgtcctccgtgaccgctgctgataccgccgtgtactactgtgccaccggctactactacggctccggcttttggggacagggcacactggttaccgtgtctagt

SEQ ID NO: 232 - DNA, 372 bp, Artificial Sequence
  Description of Artificial Sequence: Synthetic polynucleotide
gaggtgcaacttgtggagagcggcggaggtctggtccaacccggaggaagtctccgtctctcctgtgctgctagtggcttcactttcagctcatattggatgacatgggtgagacaagccccaggaaaggggctcgagtgggtagctaacattaaacaggacggctccgaacggtactatgttgattctgtgaagggacggttcactatatccagggataatgcaaaaaattcactctatcttcaaatgaactcactcagagcagaggacactgccgtgtattattgcgccagggatcaaaattatgacatactgaccggtcattatggaatggatgtttggggccagggaacaaccgttaccgtctcaagt

SEQ ID NO: 233 - DNA, 375 bp, Artificial Sequence
  Description of Artificial Sequence: Synthetic polynucleotide
caggtgcagctgcaggagtcgggcccaggactggtgaagccttcggagaccctgtccctcacctgcactgtctctggtggctccatcagtagttactactggagctggatccggcagcccccagggaagggactggagtggattggatatatctattacagtgggagcaccaactacaacccctccctcaagagtcgagtcaccatatcagtagacacgtccaagaaccagttctccctgaagctgagctctgtgaccgctgcggacacggccgtgtattactgtgcggggactacgatttttggagtggttacccccaacttctactacggtatggacgtctggggccaagggaccacggtcaccgtctcctca

SEQ ID NO: 234 - DNA, 369 bp, Artificial Sequence
  Description of Artificial Sequence: Synthetic polynucleotide
gaggtgcagctggtggagtctgggggaggcgtggtccagcctgggaggtccctgagactctcctgtgtagcctctggattcaccttcagtagttatgacatacactgggtccgccaggctccaggcaaggggctggagtgggtggcaattatttcatatgatggaagtaaaaaagactatacagactccgtgaagggccgattcaccatctccagagacaattccaagaacacgctgtatctgcaaatggacagcctgagagttgaggactcggctgtgtattcctgtgcgagagaaagtggctggtcccactactactattacggtatggacgtctggggccaagggacaatggtcaccgtctcttca

SEQ ID NO: 235 - DNA, 357 bp, Artificial Sequence
  Description of Artificial Sequence: Synthetic polynucleotide
caggtgcagctgcaggagtcgggcccaggactggtgaagccttcggagaccctgtccctcacctgcactgtctctggtggctccatcagtagttactattggagctggctccggcagcccgccgggtcgggactggagtggattgggcgtttatatgtcagtgggttcaccaactacaacccctccctcaagagtcgagtcaccttgtcactagacccgtccaggaaccagttgtccctgaaactgagttctgtgaccgccgcggacacggccgtatattattgtgcgggagatagtgggaactactggggttggttcgacccctggggccagggaaccctggtcaccgtctcctca

SEQ ID NO: 236 - DNA, 363 bp, Artificial Sequence
  Description of Artificial Sequence: Synthetic polynucleotide
caggtgcagctggtggagtctgggggaggcgtggtccagcctgggaggtccctgagactctcctgtgcagcctctggattcaccttcagttactatggcatgcactgggtccgccaggctccaggcaaggggctggagtgggtggcatttatatcatatgatggaagtaataaatactatgcagactccgtgaagggccgattcaccatctccagagacaattccaagaacacgctgtatctgcaaatgaacagcctgagagctgaggacacggctgtgtattactgtgcccacctcccttatagtgggagctactgggcctttgactactggggccagggaacccaggtcaccgtctcttca

SEQ ID NO: 237 - DNA, 333 bp, Artificial Sequence
  Description of Artificial Sequence: Synthetic polynucleotide
gacattgtgctgacacagagtccagcatccttggcagtatctttggggcagcgggcaacaatttcatgccgtgcatctgaaagtgtggagtattttggaacttctcttatgcactggtatcgccagaagcctgggcagcctcccaaactccttatatatgccgcttccaacgtggagtccggagtaccagcacgcttttccggctctgggtccggcacagacttttccctcaatatccaacctgttgaagaagacgatttttccatgtatttttgccaacagacacgcaaggttccatatacattcggcggcggcactaaacttgagatcaaa

SEQ ID NO: 238 - DNA, 333 bp, Artificial Sequence
  Description of Artificial Sequence: Synthetic polynucleotide
gacatagtcttgactcagagcccggattcccttgctgtgtctctgggagaacgagctacgatcaactgcaaggcaagtgaatccgtagaatacttcgggacatcattgatgcattggtatcaacagaaaccggggcaaccgcccaaattgctgatatatgcggctagtaatagagaatcaggagtaccggataggtttagtggttcaggatcaggtacagatttcaccctgacaataagtagcttgcaagccgaagacgtagcagtgtattactgccaacaaacccgaaaggtgccatatacgtttggacagggtacaaagttggaaatcaaa

SEQ ID NO: 239 - DNA, 333 bp, Artificial Sequence
  Description of Artificial Sequence: Synthetic polynucleotide
gacatcgtgctgacccagagcccagacagcctggccgtgagcctgggcgagcgcgccaccatcaactgcaaggccagcgagagcgtggagtacttcggcaccagcctgatgcactggtaccagcagaagccaggccagccaccaaagctgctgatctacgctgccagcaaccgcgagagcggcgtgccagaccgcttcagcggcagcggcagcggcaccgacttcaccctgaccatccagagcgtgcaggccgaggacgtctccgtgtacttctgccagcagacccgcaaggtgccatacaccttcggccagggcaccaagctggagatcaag

SEQ ID NO: 240 - DNA, 333 bp, Artificial Sequence
  Description of Artificial Sequence: Synthetic polynucleotide
gacatcgtgctgacccagagcccagacagcctggccgtgagcctgggcgagcgcgccaccatcaactgcaaggccagcgagagcgtggagtacttcggcaccagcctgatgcactggtaccagcagaagccaggccagccaccaaagctgctgatctacgctgccagcaaccgcgagagcggcgtgccagaccgcttcagcggcagcggcagcggcaccgacttcaccctgaccatcagcagcgtgcaggccgaggacgtcgccgtgtactactgccagcagacccgcaaggtgccatacaccttcggccagggcaccaagctggagatcaag

SEQ ID NO: 241 - DNA, 333 bp, Artificial Sequence
  Description of Artificial Sequence: Synthetic polynucleotide
gacatcgtgctgacccagtctccagactctctggctgtgtctctgggcgagagagccaccatcaactgcagagcctccgagtccgtggaatacttcggcacctctctgatgcactggtaccagcagaagcccggccagcctcctaagctgctgatctacgccgcctccaacgtggaatctggcgtgcccgatagattttccggctctggctctggcaccgactttaccctgaccatcagctctctgcaggccgaggatgtggccgtgtacttctgtcagcagacccggaaggtgccctacacatttggcggcggaacaaaggtggaaatcaag

SEQ ID NO: 242 - DNA, 333 bp, Artificial Sequence
  Description of Artificial Sequence: Synthetic polynucleotide
gagatcgtgctgacccagtctcctgccacactgtcactgtctccaggcgagagagccaccctctcttgtagagcctccgagtccgtggaatacttcggcacctctctgatgcactggtaccagcagaagcccggccagcctcctagactgctgatctacgccgcctccaacgtcgaatctggcatccccgctagattctccggctctggctctggcacagactttaccctgaccatctcctccgtggaacccgaggatttcgctgtgtacttttgccagcagacccggaaggtgccctacacatttggcggcggaacaaaggtggaaatcaag

SEQ ID NO: 243 - DNA, 321 bp, Artificial Sequence
  Description of Artificial Sequence: Synthetic polynucleotide
gaaatcgtactgacccagtccccttctttcttgagtgcatcagttggggatagagtgaccattacttgtagagcatctcaaggtatttcttcatacttgtcttggtatcaacaaaaacctggcaaggcacccaaactcttgatctacgccacctctacattgcaaagtggggttccttctaggttttcaggctccggctctggtaccgagttcaccctcactataagcagtctccaacctgaagatttcgctacttattattgtcagcagcttaattcttatccccgaacctttggtcaaggaactaaggtcgagatcaaa

SEQ ID NO: 244 - DNA, 321 bp, Artificial Sequence
  Description of Artificial Sequence: Synthetic polynucleotide
gacatccagatgacccagtctccttccttcctgtctgcatctgtaggagacagagtcaccatcacttgccgggccagtcagggcattagcagttatttagcctggtatcagcaaaaaccagggaaagcccctaagttcctgatctatgctgcatccactttgcaaagtggggtcccatcaaggttcagcggcagtggatctgggacagaattcactctcacaatcagcagcctgcagcctgaagattttgcaacttattactgtcaacagcttaatagttaccctctcactttcggcggagggaccaaggtggaaatcaaa

SEQ ID NO: 245 - DNA, 321 bp, Artificial Sequence
  Description of Artificial Sequence: Synthetic polynucleotide
gacatcgtgatgacccagtctccatcctccctgtctgcatctgtaggagacagagtcaccatcacttgccgggcgagtcaggacattagcaattatttagcctggtatcagcagaaaccagggaaagttcctaagttcctgatctatgctgcatccactttgcactctggggtcccatctcggttcagtggcagtggatctgggacagatttcactctcaccatcagcagcctgcagcctgaagatgttgcaacttattactgtcaaaagtataacagtgccccgtacacttttggccaagggacacgactggagattaaa

SEQ ID NO: 246 - DNA, 318 bp, Artificial Sequence
  Description of Artificial Sequence: Synthetic polynucleotide
tcctatgagctgactcagccaccctcagtgtccgtgtccccaggagagacagccagcatcacctgctctggagatcaattgggggaaaattatgcttgctggtatcagcagaagccaggccagtcccctgtgttggtcatctatcaagatagtaagcggccctcagggatccctgagcgattctctggctccaactctgggaacacagccactctgaccatcagcgggacccaggctctggatgaggctgactattactgtcaggcgtgggacaacagtattgtggtattcggcggagggaccaagctgaccgtccta

SEQ ID NO: 247 - DNA, 327 bp, Artificial Sequence
  Description of Artificial Sequence: Synthetic polynucleotide
cagtctgtgctgactcagccaccctcggtgtcagtggcccccgggcagacggccagtattacctgtgggggagacaacattggaagtaaaagtgtgcactggtaccagcagaagccaggccaggcccctgtgctggtcgtctatgataatagcgaccggccctcagggatccctgagcgattctctggctccaactctgggaccacggccaccctgaccatcagcagggtcgaagccggggatgaggccgactattactgtcaggtgtgggatagtagtagtgatcatcctgtggtattcggcggagggaccaaggtcaccgtccta

SEQ ID NO: 248 - protein, 116 aa, Artificial Sequence
  Description of Artificial Sequence: Synthetic polypeptide
EVQLVESGGGLVKPGGSLRLSCAASGFTFSRYNMNWVRQAPGKGLEWVSSISTSSNYIYYADSVKGRFTFSRDNAKNSLDLQMSGLRAEDTAIYYCTRGWGPFDYWGQGTLVTVSS

SEQ ID NO: 249 - protein, 107 aa, Artificial Sequence
  Description of Artificial Sequence: Synthetic polypeptide
DILLTQSPGILSVSPGERVSFSCRARQSIGTAIHWYQQRTNGSPRLLIKYASESISGIPSRFSGSGSGTDFTLTINSVESEDIADYYCQQSNSWPYTFGGGTKLEIK

SEQ ID NO: 250 - protein, 107 aa, Artificial Sequence
  Description of Artificial Sequence: Synthetic polypeptide
DIQMTQSPSSLSASVGDRVTITCRARQSIGTAIHWYQQKPGKAPKLLIYYASESISGVPSRFSGSGSGTDFTLTISSVQPEDFATYYCQQSGSWPYTFGQGTKLEIK

SEQ ID NO: 251 - protein, 107 aa, Artificial Sequence
  Description of Artificial Sequence: Synthetic polypeptide
DIQMTQSPSSLSASVGDRVTITCRARQSIGTAIHWYQQKPGKAPKLLIKYASESISGVPSRFSGSGSGTDFTLTISSLQPEDFATYYCQQSGSWPYTFGQGTKLEIK

SEQ ID NO: 252 - protein, 107 aa, Artificial Sequence
  Description of Artificial Sequence: Synthetic polypeptide
DIQMTQSPSSLSASVGDRVTITCRARQSIGTAIHWYQQKPGKAPKLLIKYASESISGVPSRFSGSGSGTDFTLTISSVQPEDFATYYCQQSGSWPYTFGQGTKLEIK

SEQ ID NO: 253 - protein, 107 aa, Artificial Sequence
  Description of Artificial Sequence: Synthetic polypeptide
DIQMTQSPSSLSASVGDRVTITCRARQSIGTAIHWYQQKPGKAPKLLIYYASESISGVPSRFSGSGSGTDFTLTISSLQPEDFATYYCQQSGSWPYTFGQGTKLEIK

SEQ ID NO: 254 - protein, 107 aa, Artificial Sequence
  Description of Artificial Sequence: Synthetic polypeptide
DILLTQSPGILSVSPGERVSFSCRARQSIGTAIHWYQQRTNGSPRLLIKYASESISGIPSRFSGSGSGTDFTLTINSVESEDIADYYCQQSGSWPYTFGGGTKLEIK

SEQ ID NO: 255 - protein, 5 aa, Artificial Sequence
  Description of Artificial Sequence: Synthetic peptide
RYNMN

SEQ ID NO: 256 - protein, 17 aa, Artificial Sequence
  Description of Artificial Sequence: Synthetic peptide
SISTSSNYIYYADSVKG

SEQ ID NO: 257 - protein, 7 aa, Artificial Sequence
  Description of Artificial Sequence: Synthetic peptide
GWGPFDY

SEQ ID NO: 258 - protein, 11 aa, Artificial Sequence
  Description of Artificial Sequence: Synthetic peptide
RARQSIGTAIH

SEQ ID NO: 259 - protein, 7 aa, Artificial Sequence
  Description of Artificial Sequence: Synthetic peptide
YASESIS

SEQ ID NO: 260 - protein, 9 aa, Artificial Sequence
  Description of Artificial Sequence: Synthetic peptide
QQSNSWPYT

SEQ ID NO: 261 - protein, 9 aa, Artificial Sequence
  Description of Artificial Sequence: Synthetic peptide
QQSGSWPYT

SEQ ID NO: 262 - protein, 446 aa, Artificial Sequence
  Description of Artificial Sequence: Synthetic polypeptide
EVQLVESGGGLVKPGGSLRLSCAASGFTFSRYNMNWVRQAPGKGLEWVSSISTSSNYIYYADSVKGRFTFSRDNAKNSLDLQMSGLRAEDTAIYYCTRGWGPFDYWGQGTLVTVSSASTKGPSVFPLAPSSKSTSGGTAALGCLVKDYFPEPVTVSWNSGALTSGVHTFPAVLQSSGLYSLSSVVTVPSSSLGTQTYICNVNHKPSNTKVDKKVEPKSCDKTHTCPPCPAPELLGGPSVFLFPPKPKDTLMISRTPEVTCVVVDVSHEDPEVKFNWYVDGVEVHNAKTKPREEQYNSTYRVVSVLTVLHQDWLNGKEYKCKVSNKALPAPIEKTISKAKGQPREPQVYTLPPSREEMTKNQVSLTCLVKGFYPSDIAVEWESNGQPENNYKTTPPVLDSDGSFFLYSKLTVDKSRWQQGNVFSCSVMHEALHNHYTQKSLSLSPGK

SEQ ID NO: 263 - DNA, 375 bp, Artificial Sequence
  Description of Artificial Sequence: Synthetic polynucleotide
caggtgcagctggtggagtctgggggaggcttggtacagcctggggggtccctgagactctcctgtgcagcctctggattcacctttagtcattatgccatgagctgggtccgccaggctccagggaaggggctggagtgggtctcaactattggtggtagtggtggtagcacatactacgcagactccgtgaagggccggttcaccatctccagagacaattccaagaacacgctgtatctgcaaatgaacagcctgagagccgaggacacggccgtatattactgtgcgaaacctcatattgtaatggtgactgctcttctctacgacggtatggacgtctggggccaagggacaatggtcaccgtctcctca

SEQ ID NO: 264 - protein, 446 aa, Artificial Sequence
  Description of Artificial Sequence: Synthetic polypeptide
EVQLVESGGGLVKPGGSLRLSCAASGFTFSRYNMNWVRQAPGKGLEWVSSISTSSNYIYYADSVKGRFTFSRDNAKNSLDLQMSGLRAEDTAIYYCTRGWGPFDYWGQGTLVTVSSASTKGPSVFPLAPSSKSTSGGTAALGCLVKDYFPEPVTVSWNSGALTSGVHTFPAVLQSSGLYSLSSVVTVPSSSLGTQTYICNVNHKPSNTKVDKKVEPKSCDKTHTCPPCPAPEAAGGPSVFLFPPKPKDTLMISRTPEVTCVVVSVSHEDPEVKFNWYVDGVEVHNAKTKPREEQYNSTYRVVSVLTVLHQDWLNGKEYKCKVSNKALPAPIEKTISKAKGQPREPQVYVYPPSREEMTKNQVSLTCLVKGFYPSDIAVEWESNGQPENNYKTTPPVLDSDGSFALVSKLTVDKSRWQQGNVFSCSVMHEALHNHYTQKSLSLSPGK

SEQ ID NO: 265 - protein, 214 aa, Artificial Sequence
  Description of Artificial Sequence: Synthetic polypeptide
DILLTQSPGILSVSPGERVSFSCRARQSIGTAIHWYQQRTNGSPRLLIKYASESISGIPSRFSGSGSGTDFTLTINSVESEDIADYYCQQSNSWPYTFGGGTKLEIKRTVAAPSVFIFPPSDEQLKSGTASVVCLLNNFYPREAKVQWKVDNALQSGNSQESVTEQDSKDSTYSLSSTLTLSKADYEKHKVYACEVTHQGLSSPVTKSFNRGEC

SEQ ID NO: 266 - protein, 214 aa, Artificial Sequence
  Description of Artificial Sequence: Synthetic polypeptide
DIQMTQSPSSLSASVGDRVTITCRARQSIGTAIHWYQQKPGKAPKLLIYYASESISGVPSRFSGSGSGTDFTLTISSVQPEDFATYYCQQSGSWPYTFGQGTKLEIKRTVAAPSVFIFPPSDEQLKSGTASVVCLLNNFYPREAKVQWKVDNALQSGNSQESVTEQDSKDSTYSLSSTLTLSKADYEKHKVYACEVTHQGLSSPVTKSFNRGEC

SEQ ID NO: 267 - protein, 214 aa, Artificial Sequence
  Description of Artificial Sequence: Synthetic polypeptide
DIQMTQSPSSLSASVGDRVTITCRARQSIGTAIHWYQQKPGKAPKLLIKYASESISGVPSRFSGSGSGTDFTLTISSLQPEDFATYYCQQSGSWPYTFGQGTKLEIKRTVAAPSVFIFPPSDEQLKSGTASVVCLLNNFYPREAKVQWKVDNALQSGNSQESVTEQDSKDSTYSLSSTLTLSKADYEKHKVYACEVTHQGLSSPVTKSFNRGEC

SEQ ID NO: 268 - protein, 214 aa, Artificial Sequence
  Description of Artificial Sequence: Synthetic polypeptide
DIQMTQSPSSLSASVGDRVTITCRARQSIGTAIHWYQQKPGKAPKLLIKYASESISGVPSRFSGSGSGTDFTLTISSVQPEDFATYYCQQSGSWPYTFGQGTKLEIKRTVAAPSVFIFPPSDEQLKSGTASVVCLLNNFYPREAKVQWKVDNALQSGNSQESVTEQDSKDSTYSLSSTLTLSKADYEKHKVYACEVTHQGLSSPVTKSFNRGEC

SEQ ID NO: 269 - protein, 214 aa, Artificial Sequence
  Description of Artificial Sequence: Synthetic polypeptide
DIQMTQSPSSLSASVGDRVTITCRARQSIGTAIHWYQQKPGKAPKLLIYYASESISGVPSRFSGSGSGTDFTLTISSLQPEDFATYYCQQSGSWPYTFGQGTKLEIKRTVAAPSVFIFPPSDEQLKSGTASVVCLLNNFYPREAKVQWKVDNALQSGNSQESVTEQDSKDSTYSLSSTLTLSKADYEKHKVYACEVTHQGLSSPVTKSFNRGEC

SEQ ID NO: 270 - protein, 214 aa, Artificial Sequence
  Description of Artificial Sequence: Synthetic polypeptide
DILLTQSPGILSVSPGERVSFSCRARQSIGTAIHWYQQRTNGSPRLLIKYASESISGIPSRFSGSGSGTDFTLTINSVESEDIADYYCQQSGSWPYTFGGGTKLEIKRTVAAPSVFIFPPSDEQLKSGTASVVCLLNNFYPREAKVQWKVDNALQSGNSQESVTEQDSKDSTYSLSSTLTLSKADYEKHKVYACEVTHQGLSSPVTKSFNRGEC

SEQ ID NO: 271 - DNA, 324 bp, Artificial Sequence
  Description of Artificial Sequence: Synthetic polynucleotide
tcttctgagctgactcagccaccctcggtgtcagtggccccaggacagacggccaggattacctgtgggggaaacaacattggaagtaaaagtgtgcactggtaccagcagaagccaggccaggcccctgtgctggtcgtctatgatgatagcgaccggccctcagggatccctgagcgattctctggctccaactctgggaacacggccaccctgaccatcagcagggtcgaagccggggatgaggccgactattactgtcaggtgtgggatagtagtagtgatcatgtggtattcggcggagggaccaagctgaccgtccta

SEQ ID NO: 272 - protein, 216 aa, Artificial Sequence
  Description of Artificial Sequence: Synthetic polypeptide
QSALTQPASVSGSPGQSITISCTGTSSNIGTYKFVSWYQQHPDKAPKVLLYEVSKRPSGVSSRFSGSKSGNTASLTISGLQAEDQADYHCVSYAGSGTLLFGGGTKLTVLGQPKAAPSVTLFPPSSEELQANKATLVCLISDFYPGAVTVAWKADSSPVKAGVETTTPSKQSNNKYAASSYLSLTPEQWKSHRSYSCQVTHEGSTVEKTVAPTECS

SEQ ID NO: 273 - DNA, 348 bp, Artificial Sequence
  Description of Artificial Sequence: Synthetic polynucleotide
gaggtgcaactggtggagtctgggggaggcctggtcaagcctggggggtccctgagactctcctgtgcagcctctggattcaccttcagtagatataacatgaactgggtccgccaggctccagggaaggggctggagtgggtctcatccattagtactagtagtaattacatatactacgcagactcagtgaagggccgattcaccttctccagagacaacgccaagaactcactggatctgcaaatgagcggcctgagagccgaggacacggctatttattactgtacgagaggctgggggccttttgactactggggccagggaaccctggtcaccgtctcctca

SEQ ID NO: 274 - DNA, 1365 bp, Artificial Sequence
  Description of Artificial Sequence: Synthetic polynucleotide
caggtgcagctggtggagtctgggggaggcttggtacagcctggggggtccctgagactctcctgtgcagcctctggattcacctttagtcattatgccatgagctgggtccgccaggctccagggaaggggctggagtgggtctcaactattggtggtagtggtggtagcacatactacgcagactccgtgaagggccggttcaccatctccagagacaattccaagaacacgctgtatctgcaaatgaacagcctgagagccgaggacacggccgtatattactgtgcgaaacctcatattgtaatggtgactgctcttctctacgacggtatggacgtctggggccaagggacaatggtcaccgtctcctcagcctccaccaagggcccatcggtcttccccctggcaccctcctccaagagcacctctgggggcacagcggccctgggctgcctggtcaaggactacttccccgaaccggtgacggtgtcgtggaactcaggcgccctgaccagcggcgtgcacaccttcccggctgtcctacagtcctcaggactctactccctcagcagcgtggtgaccgtgccctccagcagcttgggcacccagacctacatctgcaacgtgaatcacaagcccagcaacaccaaggtggacaagaaagttgagcccaaatcttgtgacaaaactcacacatgcccaccgtgcccagcacctgaagccgccgggggaccgtcagtcttcctcttccccccaaaacccaaggacaccctcatgatctcccggacccctgaggtcacatgcgtggtggtgagcgtgagccacgaagaccctgaggtcaagttcaactggtacgtggacggcgtggaggtgcataatgccaagacaaagccgcgggaggagcagtacaacagcacgtaccgtgtggtcagcgtcctcaccgtcctgcaccaggactggctgaatggcaaggagtacaagtgcaaggtctccaacaaagccctcccagcccccatcgagaaaaccatctccaaagccaaagggcagccccgagaaccacaggtgtacaccctgcccccatcccgggaggagatgaccaagaaccaggtcagcctgacctgcctggtcaaaggcttctatcccagcgacatcgccgtggagtgggagagcaatgggcagccggagaacaactacaagaccacgcctcccgtgctggactccgacggctccttcttcctctacagcaagctcaccgtggacaagagcagatggcagcaggggaacgtcttctcatgctccgtgatgcatgaggctctgcacaaccactacacgcagaagagcctctccctgtctccgggtaaa

SEQ ID NO: 275 - DNA, 360 bp, Artificial Sequence
  Description of Artificial Sequence: Synthetic polynucleotide
caggtgcagctgcagcagtctggccctagactcgtgcggccttcccagaccctgtctctgacctgtgccatctccggcgactccgtgttcaacaacaacgccgcctggtcctggatccggcagagcccttctagaggcctggaatggctgggccggacctactaccggtccaagtggctgtacgactacgccgtgtccgtgaagtcccggatcaccgtgaaccctgacacctcccggaaccagttcaccctgcagctgaactccgtgacccctgaggacaccgccctgtactactgcgccagaggctactcctcctccttcgactattggggccagggcaccctcgtgaccgtgtcctct

SEQ ID NO: 276 - DNA, 321 bp, Artificial Sequence
  Description of Artificial Sequence: Synthetic polynucleotide
gatatacttcttacccagagtcccggcatcctctccgttagccctggggagagagtctcattctcatgccgagccagacagtcaattggtaccgcaatacactggtatcaacagcggaccaatggttctccccgacttctgataaagtacgcatcagaatcaattagtggaataccatcaagatttagtggctcagggagtggaaccgattttactctgaccatcaactcagtggaatctgaggacattgccgactactactgtcaacaaagcaatagttggccatataccttcggaggcggaactaaattggagataaaa

SEQ ID NO: 277 - DNA, 321 bp, Artificial Sequence
  Description of Artificial Sequence: Synthetic polynucleotide
gacatccagatgacacagtcaccttctagtttgtctgcttctgtaggcgaccgtgtaactatcacctgtcgagcccgtcaaagtattggtactgccattcactggtaccaacaaaaacctggcaaagctccaaaactcttgatctactatgcctccgaaagcatatcaggggtcccaagcagattctcaggcagtggcagtggcactgacttcactctcaccatttctagcgtgcaaccagaggacttcgccacttattactgccaacagtcagggagctggccctacaccttcggccaaggtacaaaactggagatcaaa

SEQ ID NO: 278 - DNA, 321 bp, Artificial Sequence
  Description of Artificial Sequence: Synthetic polynucleotide
gacatacaaatgacacaatcaccctcttctctttctgcaagcgttggcgaccgtgtcactatcacttgtcgagcccgccagtccataggtactgccattcactggtatcaacagaagcctggcaaggctcccaaactcctgattaagtatgccagcgagagcatttccggcgtaccttcaagattttccggctccggtagtgggacagatttcactctcactatatctagcctccaaccagaagatttcgccacttactactgtcaacaatcaggttcatggccttacactttcggccaggggacaaaattggagatcaag

SEQ ID NO: 279 - DNA, 321 bp, Artificial Sequence
  Description of Artificial Sequence: Synthetic polynucleotide
gacatccaaatgactcaatcacctagcagcctctccgcctccgttggagatagagtgacaataacttgccgagcccggcaaagtatcggaactgctattcactggtatcaacaaaaacctggaaaggcacctaagctcttgattaaatacgcttctgagtccatctccggcgtgccttcacgattcagcggcagcggtagtggtactgactttaccctcactattagttctgttcagccagaggacttcgcaacttattactgccaacagagtggttcctggccatacacttttggccaggggactaaattggaaatcaaa

SEQ ID NO: 280 - DNA, 321 bp, Artificial Sequence
  Description of Artificial Sequence: Synthetic polynucleotide
gacatccaaatgactcaaagcccctctagtttgagtgcatctgtaggtgaccgggtaacaatcacctgccgtgcccggcaaagtataggtactgcaatccactggtaccagcaaaaacccggcaaagcaccaaagctgctcatatactatgctagtgagagcatttctggcgttcctagtcgattttctggatcagggagtggaactgattttacactgacaatcagcagcctccaacccgaagacttcgccacctactattgtcagcagtctgggtcctggccttacacattcggtcaaggaactaaattggagatcaaa

SEQ ID NO: 281 - DNA, 321 bp, Artificial Sequence
  Description of Artificial Sequence: Synthetic polynucleotide
gacattttgctgacacagagccctggtatcctctcagtcagtccaggggaacgcgtttcatttagctgccgtgctcgacagagcattgggaccgcaatccactggtaccaacaaagaactaacggttcaccacggcttttgattaagtatgcctccgaatccatcagtggcattcctagtcgtttttctggatcaggatcaggcaccgactttactctcacaattaatagtgtcgaaagtgaggacattgcagactattattgtcagcaatccggttcctggccctatacttttggtggtggtactaagttggaaattaaa

SEQ ID NO: 282 - DNA, 642 bp, Artificial Sequence
  Description of Artificial Sequence: Synthetic polynucleotide
tcttctgagctgactcagccaccctcggtgtcagtggccccaggacagacggccaggattacctgtgggggaaacaacattggaagtaaaagtgtgcactggtaccagcagaagccaggccaggcccctgtgctggtcgtctatgatgatagcgaccggccctcagggatccctgagcgattctctggctccaactctgggaacacggccaccctgaccatcagcagggtcgaagccggggatgaggccgactattactgtcaggtgtgggatagtagtagtgatcatgtggtattcggcggagggaccaagctgaccgtcctaggtcagcccaaggctgcacccagtgtcactctgttcccgccctcctctgaggagcttcaagccaacaaggccacactggtgtgtctcataagtgacttctacccgggagccgtgacagtggcctggaaggccgatagcagccccgtcaaggcgggagtggagaccaccacaccctccaaacaaagcaacaacaagtacgcggccagcagctatctgagcctgacgcctgagcagtggaagtcccacagaagctacagctgccaggtcacgcatgaagggagcaccgtggagaagacagtggcccctacagaatgttca

SEQ ID NO: 283 - DNA, 329 bp, Artificial Sequence
  Description of Artificial Sequence: Synthetic polynucleotide
agtctgctctgacccagcctgcctccgtgtctggctctcccggccagtccatcaccatcagctgtaccggcacctcctccaacatcggcacctacaagttcgtgtcctggtatcagcagcaccccgacaaggcccccaaagtgctgctgtacgaggtgtccaagcggccctctggcgtgtcctccagattctccggctccaagtctggcaacaccgcctccctgaccatcagcggactgcaggctgaggaccaggccgactaccactgtgtgtcctacgctggctctggcaccctgctgtttggcggaggcaccaagctgaccgtgctg

SEQ ID NO: 284 - DNA, 1341 bp, Artificial Sequence
  Description of Artificial Sequence: Synthetic polynucleotide
gatgtgcagcttcaggagtctggacccggacttgttaaaccaagtcagtctctgtccctgacctgtaccgtcaccggcaacagcatcacaagcgattacgcatggaactggatcaggcagttccctggaaatcgactcgaatggatgggctacatttcatactccggttcaaccacttactctccatccttgaaatctaggttcagcatcacccgtgatacctcaaagaaccaattttttctgcaactgaatagcgtaactccagaggacacagccacatatttctgcgccactgggtattactatggctcaggtttctggggtcagggcactctcgtcaccgtcagcagcgccaaaacaacagcaccaagtgtctatccactggcccctgtgtgtggagatacaactggctcctcggtgactctaggatgcctggtcaagggttatttccctgagccagtgaccttgacctggaactctggatccctgtccagtggtgtgcacaccttcccagctgtcctgcagtctgacctctacaccctcagcagctcagtgactgtaacctcgagcacctggcccagccagtccatcacctgcaatgtggcccacccggcaagcagcaccaaggtggacaagaaaattgagcccagagggcccacaatcaagccctgtcctccatgcaaatgcccagcacctaacctcttgggtggaccatccgtcttcatcttccctccaaagatcaaggatgtactcatgatctccctgagccccatagtcacatgtgtggtggtggatgtgagcgaggatgacccagatgtccagatcagctggtttgtgaacaacgtggaagtacacacagctcagacacaaacccatagagaggattacaacagtactctccgggtggtcagtgccctccccatccagcaccaggactggatgagtggcaaggagttcaaatgcaaggtcaacaacaaagacctcccagcgcccatcgagagaaccatctcaaaacccaaagggtcagtaagagctccacaggtatatgtcttgcctccaccagaagaagagatgactaagaaacaggtcactctgacctgcatggtcaccgacttcatgcctgaagacatttacgtggagtggaccaacaacgggaaaacagagctaaactacaagaacactgaaccagtcctggactctgatggttcttacttcatgtacagcaagctgagagtggaaaagaagaactgggtggaaagaaatagctactcctgttcagtggtccacgagggtctgcacaatcaccacacgactaagagcttctcccggactccgggtaaa

SEQ ID NO: 285 - DNA, 1341 bp, Artificial Sequence
  Description of Artificial Sequence: Synthetic polynucleotide
caggtccaactgcaagagagcggaccgggcctggtaaagccatccgacacattgtccctgacgtgtgcggtaagtggaaactctatcactagcgactatgcgtggaattggataagacaaccgccgggcaaggggctggaatggataggatatatcagctattccggttctacgacatacaatccttccctgaaaagcagagtcactatgtcacgcgacacgtccaagaatcagttctcattgaaattgtcatccgtaacggccgttgacactgcggtttattattgcgcaaccggatattactacggctctggtttttggggacagggaacacttgttactgttagttcagcctccaccaagggcccatcggtcttccccctggcaccctcctccaagagcacctctgggggcacagcggccctgggctgcctggtcaaggactacttccccgaaccggtgacggtgtcgtggaactcaggcgccctgaccagcggcgtgcacaccttcccggctgtcctacagtcctcaggactctactccctcagcagcgtggtgaccgtgccctccagcagcttgggcacccagacctacatctgcaacgtgaatcacaagcccagcaacaccaaggtggacaagaaagttgagcccaaatcttgtgacaaaactcacacatgcccaccgtgcccagcacctgaactcctggggggaccgtcagtcttcctcttccccccaaaacccaaggacaccctcatgatctcccggacccctgaggtcacatgcgtggtggtggacgtgagccacgaagaccctgaggtcaagttcaactggtacgtggacggcgtggaggtgcataatgccaagacaaagccgcgggaggagcagtacaacagcacgtaccgtgtggtcagcgtcctcaccgtcctgcaccaggactggctgaatggcaaggagtacaagtgcaaggtctccaacaaagccctcccagcccccatcgagaaaaccatctccaaagccaaagggcagccccgagaaccacaggtgtacaccctgcccccatcccgggaggagatgaccaagaaccaggtcagcctgacctgcctggtcaaaggcttctatcccagcgacatcgccgtggagtgggagagcaatgggcagccggagaacaactacaagaccacgcctcccgtgctggactccgacggctccttcttcctctacagcaagctcaccgtggacaagagcagatggcagcaggggaacgtcttctcatgctccgtgatgcatgaggctctgcacaaccactacacgcagaagagcctctccctgtctccgggtaaa

SEQ ID NO: 286-291 - skipped (6 entries)

SEQ ID NO: 292 - DNA, 1356 bp, Artificial Sequence
  Description of Artificial Sequence: Synthetic polynucleotide
caggtgcagctgcaggagtcgggcccaggactggtgaagccttcggagaccctgtccctcacctgcactgtctctggtggctccatcagtagttactactggagctggatccggcagcccccagggaagggactggagtggattggatatatctattacagtgggagcaccaactacaacccctccctcaagagtcgagtcaccatatcagtagacacgtccaagaaccagttctccctgaagctgagctctgtgaccgctgcggacacggccgtgtattactgtgcggggactacgatttttggagtggttacccccaacttctactacggtatggacgtctggggccaagggaccacggtcaccgtctcctcagcttccaccaagggcccatccgtcttccccctggcgccctgctccaggagcacctccgagagcacagccgccctgggctgcctggtcaaggactacttccccgaaccggtgacggtgtcgtggaactcaggcgccctgaccagcggcgtgcacaccttcccggctgtcctacagtcctcaggactctactccctcagcagcgtggtgaccgtgccctccagcagcttgggcacgaaaacctacacttgcaacgtagatcacaagcccagcaacaccaaggtggacaagagagttgagtccaaatatggtcccccatgcccaccatgcccagcacctgaggccgccgggggaccatcagtcttcctgttccccccaaaacccaaggacactctcatgatctcccggacccctgaggtcacgtgcgtggtggtggacgtgagccaggaagaccccgaggtccagttcaactggtacgtggatggcgtggaggtgcataatgccaagacaaagccgcgggaggagcagttcaacagcacgtaccgtgtggtcagcgtcctcaccgtcctgcaccaggactggctgaacggcaaggagtacaagtgcaaggtctccaacaaaggcctcccgtcctccatcgagaaaaccatctccaaagccaaagggcagccccgagagccacaggtgtacaccctgcccccatcccaggaggagatgaccaagaaccaggtcagcctgacctgcctggtcaaaggcttctaccccagcgacatcgccgtggagtgggagagcaatgggcagccggagaacaactacaagaccacgcctcccgtgctggactccgacggctccttcttcctctacagcaggctaaccgtggacaagagcagatggcaggaggggaatgtcttctcatgctccgtgatgcatgaggctctgcacaaccactacacacagaagagcctctccctgtctctgggtaaa

SEQ ID NO: 293 - DNA, 1350 bp, Artificial Sequence
  Description of Artificial Sequence: Synthetic polynucleotide
gaggtgcagctggtggagtctgggggaggcgtggtccagcctgggaggtccctgagactctcctgtgtagcctctggattcaccttcagtagttatgacatacactgggtccgccaggctccaggcaaggggctggagtgggtggcaattatttcatatgatggaagtaaaaaagactatacagactccgtgaagggccgattcaccatctccagagacaattccaagaacacgctgtatctgcaaatggacagcctgagagttgaggactcggctgtgtattcctgtgcgagagaaagtggctggtcccactactactattacggtatggacgtctggggccaagggacaatggtcaccgtctcttcagcttccaccaagggcccatccgtcttccccctggcgccctgctccaggagcacctccgagagcacagccgccctgggctgcctggtcaaggactacttccccgaaccggtgacggtgtcgtggaactcaggcgccctgaccagcggcgtgcacaccttcccggctgtcctacagtcctcaggactctactccctcagcagcgtggtgaccgtgccctccagcagcttgggcacgaaaacctacacttgcaacgtagatcacaagcccagcaacaccaaggtggacaagagagttgagtccaaatatggtcccccatgcccaccatgcccagcacctgaggccgccgggggaccatcagtcttcctgttccccccaaaacccaaggacactctcatgatctcccggacccctgaggtcacgtgcgtggtggtggacgtgagccaggaagaccccgaggtccagttcaactggtacgtggatggcgtggaggtgcataatgccaagacaaagccgcgggaggagcagttcaacagcacgtaccgtgtggtcagcgtcctcaccgtcctgcaccaggactggctgaacggcaaggagtacaagtgcaaggtctccaacaaaggcctcccgtcctccatcgagaaaaccatctccaaagccaaagggcagccccgagagccacaggtgtacaccctgcccccatcccaggaggagatgaccaagaaccaggtcagcctgacctgcctggtcaaaggcttctaccccagcgacatcgccgtggagtgggagagcaatgggcagccggagaacaactacaagaccacgcctcccgtgctggactccgacggctccttcttcctctacagcaggctaaccgtggacaagagcagatggcaggaggggaatgtcttctcatgctccgtgatgcatgaggctctgcacaaccactacacacagaagagcctctccctgtctctgggtaaa

SEQ ID NO: 294 - DNA, 1338 bp, Artificial Sequence
  Description of Artificial Sequence: Synthetic polynucleotide
caggtgcagctgcaggagtcgggcccaggactggtgaagccttcggagaccctgtccctcacctgcactgtctctggtggctccatcagtagttactattggagctggctccggcagcccgccgggtcgggactggagtggattgggcgtttatatgtcagtgggttcaccaactacaacccctccctcaagagtcgagtcaccttgtcactagacccgtccaggaaccagttgtccctgaaactgagttctgtgaccgccgcggacacggccgtatattattgtgcgggagatagtgggaactactggggttggttcgacccctggggccagggaaccctggtcaccgtctcctcagcttccaccaagggcccatccgtcttccccctggcgccctgctccaggagcacctccgagagcacagccgccctgggctgcctggtcaaggactacttccccgaaccggtgacggtgtcgtggaactcaggcgccctgaccagcggcgtgcacaccttcccggctgtcctacagtcctcaggactctactccctcagcagcgtggtgaccgtgccctccagcagcttgggcacgaaaacctacacttgcaacgtagatcacaagcccagcaacaccaaggtggacaagagagttgagtccaaatatggtcccccatgcccaccatgcccagcacctgaggccgccgggggaccatcagtcttcctgttccccccaaaacccaaggacactctcatgatctcccggacccctgaggtcacgtgcgtggtggtggacgtgagccaggaagaccccgaggtccagttcaactggtacgtggatggcgtggaggtgcataatgccaagacaaagccgcgggaggagcagttcaacagcacgtaccgtgtggtcagcgtcctcaccgtcctgcaccaggactggctgaacggcaaggagtacaagtgcaaggtctccaacaaaggcctcccgtcctccatcgagaaaaccatctccaaagccaaagggcagccccgagagccacaggtgtacaccctgcccccatcccaggaggagatgaccaagaaccaggtcagcctgacctgcctggtcaaaggcttctaccccagcgacatcgccgtggagtgggagagcaatgggcagccggagaacaactacaagaccacgcctcccgtgctggactccgacggctccttcttcctctacagcaggctaaccgtggacaagagcagatggcaggaggggaatgtcttctcatgctccgtgatgcatgaggctctgcacaaccactacacacagaagagcctctccctgtctctgggtaaa

SEQ ID NO: 295 - DNA, 1353 bp, Artificial Sequence
  Description of Artificial Sequence: Synthetic polynucleotide
caggtgcagctggtggagtctgggggaggcgtggtccagcctgggaggtccctgagactctcctgtgcagcctctggattcaccttcagttactatggcatgcactgggtccgccaggctccaggcaaggggctggagtgggtggcatttatatcatatgatggaagtaataaatactatgcagactccgtgaagggccgattcaccatctccagagacaattccaagaacacgctgtatctgcaaatgaacagcctgagagctgaggacacggctgtgtattactgtgcccacctcccttatagtgggagctactgggcctttgactactggggccagggaacccaggtcaccgtctcttcagcctccaccaagggcccatcggtcttccccctggcaccctcctccaagagcacctctgggggcacagcggccctgggctgcctggtcaaggactacttccccgaaccggtgacggtgtcgtggaactcaggcgccctgaccagcggcgtgcacaccttcccggctgtcctacagtcctcaggactctactccctcagcagcgtggtgaccgtgccctccagcagcttgggcacccagacctacatctgcaacgtgaatcacaagcccagcaacaccaaggtggacaagaaagttgagcccaaatcttgtgacaaaactcacacatgcccaccgtgcccagcacctgaagccgccgggggaccgtcagtcttcctcttccccccaaaacccaaggacaccctcatgatctcccggacccctgaggtcacatgcgtggtggtgagcgtgagccacgaagaccctgaggtcaagttcaactggtacgtggacggcgtggaggtgcataatgccaagacaaagccgcgggaggagcagtacaacagcacgtaccgtgtggtcagcgtcctcaccgtcctgcaccaggactggctgaatggcaaggagtacaagtgcaaggtctccaacaaagccctcccagcccccatcgagaaaaccatctccaaagccaaagggcagccccgagaaccacaggtgtacaccctgcccccatcccgggaggagatgaccaagaaccaggtcagcctgacctgcctggtcaaaggcttctatcccagcgacatcgccgtggagtgggagagcaatgggcagccggagaacaactacaagaccacgcctcccgtgctggactccgacggctccttcttcctctacagcaagctcaccgtggacaagagcagatggcagcaggggaacgtcttctcatgctccgtgatgcatgaggctctgcacaaccactacacgcagaagagcctctccctgtctccgggtaaa

SEQ ID NO: 296 - DNA, 654 bp, Artificial Sequence
  Description of Artificial Sequence: Synthetic polynucleotide
gacattgtgctgacacagagtccagcatccttggcagtatctttggggcagcgggcaacaatttcatgccgtgcatctgaaagtgtggagtattttggaacttctcttatgcactggtatcgccagaagcctgggcagcctcccaaactccttatatatgccgcttccaacgtggagtccggagtaccagcacgcttttccggctctgggtccggcacagacttttccctcaatatccaacctgttgaagaagacgatttttccatgtatttttgccaacagacacgcaaggttccatatacattcggcggcggcactaaacttgagatcaaacgggctgatgctgcaccgactgtgtccatcttcccaccatccagtgagcagttaacatctggaggtgcctcagtcgtgtgcttcttgaacaacttctaccccaaagacatcaatgtcaagtggaagattgatggcagtgaacgacaaaatggcgtcctgaacagttggactgatcaggacagcaaagacagcacctacagcatgagcagcaccctcacgttgaccaaggacgagtatgaacgacataacagctatacctgtgaggccactcacaagacatcaacttcacccattgtcaagagcttcaacaggaatgagtgt

SEQ ID NO: 297 - DNA, 654 bp, Artificial Sequence
  Description of Artificial Sequence: Synthetic polynucleotide
gacatagtcttgactcagagcccggattcccttgctgtgtctctgggagaacgagctacgatcaactgcaaggcaagtgaatccgtagaatacttcgggacatcattgatgcattggtatcaacagaaaccggggcaaccgcccaaattgctgatatatgcggctagtaatagagaatcaggagtaccggataggtttagtggttcaggatcaggtacagatttcaccctgacaataagtagcttgcaagccgaagacgtagcagtgtattactgccaacaaacccgaaaggtgccatatacgtttggacagggtacaaagttggaaatcaaacgtacggtggctgcaccatctgtcttcatcttcccgccatctgatgagcagttgaaatctggaactgcctctgttgtgtgcctgctgaataacttctatcccagagaggccaaagtacagtggaaggtggataacgccctccaatcgggtaactcccaggagagtgtcacagagcaggacagcaaggacagcacctacagcctcagcagcaccctgacgctgagcaaagcagactacgagaaacacaaagtctacgcctgcgaagtcacccatcagggcctgagctcgcccgtcacaaagagcttcaacaggggagagtgt

SEQ ID NO: 298-302 - skipped (5 entries)

SEQ ID NO: 303 - DNA, 642 bp, Artificial Sequence
  Description of Artificial Sequence: Synthetic polynucleotide
gatattcaaatgacccagtcaccatcattcctgtccgcctcagtgggagatcgcgtcactattacttgtcgtgctagccaggggatatcatcatatttggcttggtatcaacaaaagccaggaaaggccccaaaattccttatatatgcagctagtacactccagagtggtgttcctagccggttctctggcagcggctcagggaccgagttcaccctgacaatctccagcttgcagcccgaagactttgcaacctactattgccagcaactgaactcctatcctctgactttcgggggaggaaccaaggttgagattaaacggacagtggccgctccttccgtgttcatcttcccaccttccgacgagcagctgaagtccggcacagcttctgtcgtgtgcctgctgaacaacttctaccctcgggaagccaaggtgcagtggaaggtggacaatgccctgcagtccggcaactcccaagagtctgtgaccgagcaggactccaaggacagcacctacagcctgtcctccacactgaccctgtccaaggccgactacgagaagcacaaggtgtacgcctgcgaagtgacccatcagggcctgtctagccctgtgaccaagtctttcaaccggggcgagtgt

SEQ ID NO: 304 - DNA, 642 bp, Artificial Sequence
  Description of Artificial Sequence: Synthetic polynucleotide
gatattgtaatgactcagtcaccctcttcactgagtgcatcagtaggtgatcgcgttaccatcacttgccgtgccagtcaagacatttcaaattaccttgcatggtaccaacaaaagcccggaaaagtgccaaagtttttgatttatgccgcttcaacactccattcaggagtgccctctcgtttcagtggatctggcagtggcaccgattttactctcacaataagcagtctccagcctgaggatgtagccacctattattgccaaaaatataattcagccccctatacttttggacagggcacacgccttgagattaaacggacagtggccgctccttccgtgttcatcttcccaccttccgacgagcagctgaagtccggcacagcttctgtcgtgtgcctgctgaacaacttctaccctcgggaagccaaggtgcagtggaaggtggacaatgccctgcagtccggcaactcccaagagtctgtgaccgagcaggactccaaggacagcacctacagcctgtcctccacactgaccctgtccaaggccgactacgagaagcacaaggtgtacgcctgcgaagtgacccatcagggcctgtctagccctgtgaccaagtctttcaaccggggcgagtgt

SEQ ID NO: 305 - DNA, 636 bp, Artificial Sequence
  Description of Artificial Sequence: Synthetic polynucleotide
tcctatgagctgactcagccaccctcagtgtccgtgtccccaggagagacagccagcatcacctgctctggagatcaattgggggaaaattatgcttgctggtatcagcagaagccaggccagtcccctgtgttggtcatctatcaagatagtaagcggccctcagggatccctgagcgattctctggctccaactctgggaacacagccactctgaccatcagcgggacccaggctctggatgaggctgactattactgtcaggcgtgggacaacagtattgtggtattcggcggagggaccaagctgaccgtcctaggtcagcccaaggctgcacccagtgtcactctgttcccgccctcctctgaggagcttcaagccaacaaggccacactggtgtgtctcataagtgacttctacccgggagccgtgacagtggcctggaaggccgatagcagccccgtcaaggcgggagtggagaccaccacaccctccaaacaaagcaacaacaagtacgcggccagcagctatctgagcctgacgcctgagcagtggaagtcccacagaagctacagctgccaggtcacgcatgaagggagcaccgtggagaagacagtggcccctacagaatgttca

SEQ ID NO: 306 - DNA, 645 bp, Artificial Sequence
  Description of Artificial Sequence: Synthetic polynucleotide
cagtctgtgctgactcagccaccctcggtgtcagtggcccccgggcagacggccagtattacctgtgggggagacaacattggaagtaaaagtgtgcactggtaccagcagaagccaggccaggcccctgtgctggtcgtctatgataatagcgaccggccctcagggatccctgagcgattctctggctccaactctgggaccacggccaccctgaccatcagcagggtcgaagccggggatgaggccgactattactgtcaggtgtgggatagtagtagtgatcatcctgtggtattcggcggagggaccaaggtcaccgtcctaggtcagcccaaggctgcacccagtgtcactctgttcccgccctcctctgaggagcttcaagccaacaaggccacactggtgtgtctcataagtgacttctacccgggagccgtgacagtggcctggaaggccgatagcagccccgtcaaggcgggagtggagaccaccacaccctccaaacaaagcaacaacaagtacgcggccagcagctatctgagcctgacgcctgagcagtggaagtcccacagaagctacagctgccaggtcacgcatgaagggagcaccgtggagaagacagtggcccctacagaatgttca

SEQ ID NO: 307 - skipped

SEQ ID NO: 308 - protein, 253 aa, Artificial Sequence
  Description of Artificial Sequence: Synthetic polypeptide
QVQLVESGGGLVQPGGSLRLSCAASGFTFSHYAMSWVRQAPGKGLEWVSTIGGSGGSTYYADSVKGRFTISRDNSKNTLYLQMNSLRAEDTAVYYCAKPHIVMVTALLYDGMDVWGQGTMVTVSSGGSEGKSSGSGSESKSTGGSSSELTQPPSVSVAPGQTARITCGGNNIGSKSVHWYQQKPGQAPVLVVYDDSDRPSGIPERFSGSNSGNTATLTISRVEAGDEADYYCQVWDSSSDHVVFGGGTKLTVL

SEQ ID NO: 309 - protein, 107 aa, Homo sapiens [sequence omitted]

SEQ ID NO: 310 - skipped

SEQ ID NO: 311 - DNA, 642 bp, Artificial Sequence
  Description of Artificial Sequence: Synthetic polynucleotide
gacatccagatgacccagagcccaagcagcctgagcgccagcgtcggcgaccgcgtgaccatcacctgtcgtgcccgccagagcatcggcaccgccatccactggtaccagcagaagccaggcaaggccccaaagctgctgatctactacgccagcgagagcatcagcggtgtgccaagccgcttcagcggcagcggcagcggcaccgacttcaccctgaccatcagcagcgtgcagccagaggacttcgccacctactactgccagcagagcggcagctggccatacaccttcggccagggcaccaagctggagatcaagcgtacggtggctgcaccatctgtcttcatcttcccgccatctgatgagcagttgaaatctggaactgcctctgttgtgtgcctgctgaataacttctatcccagagaggccaaagtacagtggaaggtggataacgccctccaatcgggtaactcccaggagagtgtcacagagcaggacagcaaggacagcacctacagcctcagcagcaccctgacgctgagcaaagcagactacgagaaacacaaagtctacgcctgcgaagtcacccatcagggcctgagctcgcccgtcacaaagagcttcaacaggggagagtgt

SEQ ID NO: 312 - DNA, 642 bp, Artificial Sequence
  Description of Artificial Sequence: Synthetic polynucleotide
gacatacaaatgacacaatcaccctcttctctttctgcaagcgttggcgaccgtgtcactatcacttgtcgagcccgccagtccataggtactgccattcactggtatcaacagaagcctggcaaggctcccaaactcctgattaagtatgccagcgagagcatttccggcgtaccttcaagattttccggctccggtagtgggacagatttcactctcactatatctagcctccaaccagaagatttcgccacttactactgtcaacaatcaggttcatggccttacactttcggccaggggacaaaattggagatcaagcggacagtggccgctccttccgtgttcatcttcccaccttccgacgagcagctgaagtccggcacagcttctgtcgtgtgcctgctgaacaacttctaccctcgggaagccaaggtgcagtggaaggtggacaatgccctgcagtccggcaactcccaagagtctgtgaccgagcaggactccaaggacagcacctacagcctgtcctccacactgaccctgtccaaggccgactacgagaagcacaaggtgtacgcctgcgaagtgacccatcagggcctgtctagccctgtgaccaagtctttcaaccggggcgagtgt

SEQ ID NO: 313 - DNA, 642 bp, Artificial Sequence
  Description of Artificial Sequence: Synthetic polynucleotide
gacatccagatgacccagagcccaagcagcctgagcgccagcgtcggcgaccgcgtgaccatcacctgtcgtgcccgccagagcatcggcaccgccatccactggtaccagcagaagccaggcaaggccccaaagctgctgatcaagtacgccagcgagagcatcagcggtgtgccaagccgcttcagcggcagcggcagcggcaccgacttcaccctgaccatcagcagcgtgcagccagaggacttcgccacctactactgccagcagagcggcagctggccatacaccttcggccagggcaccaagctggagatcaagcgtacggtggctgcaccatctgtcttcatcttcccgccatctgatgagcagttgaaatctggaactgcctctgttgtgtgcctgctgaataacttctatcccagagaggccaaagtacagtggaaggtggataacgccctccaatcgggtaactcccaggagagtgtcacagagcaggacagcaaggacagcacctacagcctcagcagcaccctgacgctgagcaaagcagactacgagaaacacaaagtctacgcctgcgaagtcacccatcagggcctgagctcgcccgtcacaaagagcttcaacaggggagagtgt

SEQ ID NO: 314 - DNA, 642 bp, Artificial Sequence
  Description of Artificial Sequence: Synthetic polynucleotide
gacatccagatgacccagagcccaagcagcctgagcgccagcgtcggcgaccgcgtgaccatcacctgtcgtgcccgccagagcatcggcaccgccatccactggtaccagcagaagccaggcaaggccccaaagctgctgatctactacgccagcgagagcatcagcggtgtgccaagccgcttcagcggcagcggcagcggcaccgacttcaccctgaccatcagcagcctgcagccagaggacttcgccacctactactgccagcagagcggcagctggccatacaccttcggccagggcaccaagctggagatcaagcgtacggtggctgcaccatctgtcttcatcttcccgccatctgatgagcagttgaaatctggaactgcctctgttgtgtgcctgctgaataacttctatcccagagaggccaaagtacagtggaaggtggataacgccctccaatcgggtaactcccaggagagtgtcacagagcaggacagcaaggacagcacctacagcctcagcagcaccctgacgctgagcaaagcagactacgagaaacacaaagtctacgcctgcgaagtcacccatcagggcctgagctcgcccgtcacaaagagcttcaacaggggagagtgt

SEQ ID NO: 315 - DNA, 642 bp, Artificial Sequence
  Description of Artificial Sequence: Synthetic polynucleotide
gacatcttgctgactcagtctccaggcatcctgtctgtgagtccaggagaaagagtcagtttctcctgcagggccagacagagcattggcacagccatacactggtatcagcaaagaacaaatggttctccaaggcttctcataaagtatgcttctgagtctatctctgggatcccttccaggtttagcggcagtggatcagggacagattttactcttaccatcaacagtgtggagtctgaagatattgcagattattactgtcaacaaagtgggagctggccgtacacgttcggaggggggaccaagctggaaataaaacgtacggtggctgcaccatctgtcttcatcttcccgccatctgatgagcagttgaaatctggaactgcctctgttgtgtgcctgctgaataacttctatcccagagaggccaaagtacagtggaaggtggataacgccctccaatcgggtaactcccaggagagtgtcacagagcaggacagcaaggacagcacctacagcctcagcagcaccctgacgctgagcaaagcagactacgagaaacacaaagtctacgcctgcgaagtcacccatcagggcctgagctcgcccgtcacaaagagcttcaacaggggagagtgt

SEQ ID NO: 316 - protein, 253 aa, Artificial Sequence
  Description of Artificial Sequence: Synthetic polypeptide
SSELTQPPSVSVAPGQTARITCGGNNIGSKSVHWYQQKPGQAPVLVVYDDSDRPSGIPERFSGSNSGNTATLTISRVEAGDEADYYCQVWDSSSDHVVFGGGTKLTVLGGSEGKSSGSGSESKSTGGSQVQLVESGGGLVQPGGSLRLSCAASGFTFSHYAMSWVRQAPGKGLEWVSTIGGSGGSTYYADSVKGRFTISRDNSKNTLYLQMNSLRAEDTAVYYCAKPHIVMVTALLYDGMDVWGQGTMVTVSS

SEQ ID NO: 317 - DNA, 648 bp, Artificial Sequence
  Description of Artificial Sequence: Synthetic polynucleotide
cagtctgctctgacccagcctgcctccgtgtctggctctcccggccagtccatcaccatcagctgtaccggcacctcctccaacatcggcacctacaagttcgtgtcctggtatcagcagcaccccgacaaggcccccaaagtgctgctgtacgaggtgtccaagcggccctctggcgtgtcctccagattctccggctccaagtctggcaacaccgcctccctgaccatcagcggactgcaggctgaggaccaggccgactaccactgtgtgtcctacgctggctctggcaccctgctgtttggcggaggcaccaagctgaccgtgctgggtcagcccaaggctgcacccagtgtcactctgttcccgccctcctctgaggagcttcaagccaacaaggccacactggtgtgtctcataagtgacttctacccgggagccgtgacagtggcctggaaggccgatagcagccccgtcaaggcgggagtggagaccaccacaccctccaaacaaagcaacaacaagtacgcggccagcagctatctgagcctgacgcctgagcagtggaagtcccacagaagctacagctgccaggtcacgcatgaagggagcaccgtggagaagacagtggcccctacagaatgttca

SEQ ID NO: 318 - protein, 248 aa, Artificial Sequence
  Description of Artificial Sequence: Synthetic polypeptide
QVQLQESGPGLVKPSQTLSLTCTVSGNSITSDYAWNWIRQFPGKGLEWIGYISYSGSTTYNPSLKSRVTISRDTSKNQFSLKLSSVTAADTAVYYCATGYYYGSGFWGQGTLVTVSSGGSEGKSSGSGSESKSTGGSDIVLTQSPDSLAVSLGERATINCRASESVEYFGTSLMHWYQQKPGQPPKLLIYAASNVESGVPDRFSGSGSGTDFTLTISSLQAEDVAVYFCQQTRKVPYTFGGGTKVEIK

SEQ ID NO: 319 - protein, 248 aa, Artificial Sequence
  Description of Artificial Sequence: Synthetic polypeptide
DIVLTQSPDSLAVSLGERATINCRASESVEYFGTSLMHWYQQKPGQPPKLLIYAASNVESGVPDRFSGSGSGTDFTLTISSLQAEDVAVYFCQQTRKVPYTFGGGTKVEIKGGSEGKSSGSGSESKSTGGSQVQLQESGPGLVKPSQTLSLTCTVSGNSITSDYAWNWIRQFPGKGLEWIGYISYSGSTTYNPSLKSRVTISRDTSKNQFSLKLSSVTAADTAVYYCATGYYYGSGFWGQGTLVTVSS

SEQ ID NO: 320 - protein, 248 aa, Artificial Sequence
  Description of Artificial Sequence: Synthetic polypeptide
QVQLQESGPGLVKPSQTLSLTCTVSGNSITSDYAWNWIRQPPGKGLEWIGYISYSGSTTYNPSLKSRVTISRDTSKNQFSLKLSSVTAADTAVYYCATGYYYGSGFWGQGTLVTVSSGGSEGKSSGSGSESKSTGGSEIVLTQSPATLSLSPGERATLSCRASESVEYFGTSLMHWYQQKPGQPPRLLIYAASNVESGIPARFSGSGSGTDFTLTISSVEPEDFAVYFCQQTRKVPYTFGGGTKVEIK

SEQ ID NO: 321 - protein, 248 aa, Artificial Sequence
  Description of Artificial Sequence: Synthetic polypeptide
EIVLTQSPATLSLSPGERATLSCRASESVEYFGTSLMHWYQQKPGQPPRLLIYAASNVESGIPARFSGSGSGTDFTLTISSVEPEDFAVYFCQQTRKVPYTFGGGTKVEIKGGSEGKSSGSGSESKSTGGSQVQLQESGPGLVKPSQTLSLTCTVSGNSITSDYAWNWIRQPPGKGLEWIGYISYSGSTTYNPSLKSRVTISRDTSKNQFSLKLSSVTAADTAVYYCATGYYYGSGFWGQGTLVTVSS

SEQ ID NO: 322 - protein, 248 aa, Artificial Sequence
  Description of Artificial Sequence: Synthetic polypeptide
QVQLQESGPGLVKPSQTLSLTCTVSGNSITSDYAWNWIRQFPGKGLEWIGYISYSGSTTYNPSLKSRVTISRDTSKNQFSLKLSSVTAADTAVYYCATGYYYGSGFWGQGTLVTVSSGGSEGKSSGSGSESKSTGGSEIVLTQSPATLSLSPGERATLSCRASESVEYFGTSLMHWYQQKPGQPPRLLIYAASNVESGIPARFSGSGSGTDFTLTISSVEPEDFAVYFCQQTRKVPYTFGGGTKVEIK

SEQ ID NO: 323 - protein, 248 aa, Artificial Sequence
  Description of Artificial Sequence: Synthetic polypeptide
EIVLTQSPATLSLSPGERATLSCRASESVEYFGTSLMHWYQQKPGQPPRLLIYAASNVESGIPARFSGSGSGTDFTLTISSVEPEDFAVYFCQQTRKVPYTFGGGTKVEIKGGSEGKSSGSGSESKSTGGSQVQLQESGPGLVKPSQTLSLTCTVSGNSITSDYAWNWIRQFPGKGLEWIGYISYSGSTTYNPSLKSRVTISRDTSKNQFSLKLSSVTAADTAVYYCATGYYYGSGFWGQGTLVTVSS

SEQ ID NO: 324 - protein, 249 aa, Artificial Sequence
  Description of Artificial Sequence: Synthetic polypeptide
QVQLVESGGGVVQPGRSLRLSCAASGFTFSYYGMHWVRQAPGKGLEWVAFISYDGSNKYYADSVKGRFTISRDNSKNTLYLQMNSLRAEDTAVYYCAHLPYSGSYWAFDYWGQGTQVTVSSGGSEGKSSGSGSESKSTGGSQSVLTQPPSVSVAPGQTASITCGGDNIGSKSVHWYQQKPGQAPVLVVYDNSDRPSGIPERFSGSNSGTTATLTISRVEAGDEADYYCQVWDSSSDHPVVFGGGTKVTV

SEQ ID NO: 325 - protein, 249 aa, Artificial Sequence
  Description of Artificial Sequence: Synthetic polypeptide
QSVLTQPPSVSVAPGQTASITCGGDNIGSKSVHWYQQKPGQAPVLVVYDNSDRPSGIPERFSGSNSGTTATLTISRVEAGDEADYYCQVWDSSSDHPVVFGGGTKVTVGGSEGKSSGSGSESKSTGGSQVQLVESGGGVVQPGRSLRLSCAASGFTFSYYGMHWVRQAPGKGLEWVAFISYDGSNKYYADSVKGRFTISRDNSKNTLYLQMNSLRAEDTAVYYCAHLPYSGSYWAFDYWGQGTQVTVSS

SEQ ID NO: 326 - protein, 475 aa, Artificial Sequence
  Description of Artificial Sequence: Synthetic polypeptide
EVQLVESGGGLVKPGGSLRLSCAASGFTFSRYNMNWVRQAPGKGLEWVSSISTSSNYIYYADSVKGRFTFSRDNAKNSLDLQMSGLRAEDTAIYYCTRGWGPFDYWGQGTLVTVSSGGSEGKSSGSGSESKSTGGSDIQMTQSPSSLSASVGDRVTITCRARQSIGTAIHWYQQKPGKAPKLLIYYASESISGVPSRFSGSGSGTDFTLTISSVQPEDFATYYCQQSGSWPYTFGQGTKLEIKEPKSSDKTHTCPPCPAPEAAGGPSVFLFPPKPKDTLMISRTPEVTCVVVSVSHEDPEVKFNWYVDGVEVHNAKTKPREEQYNSTYRVVSVLTVLHQDWLNGKEYKCKVSNKALPAPIEKTISKAKGQPREPQVYVYPPSREEMTKNQVSLTCLVKGFYPSDIAVEWESNGQPENNYKTTPPVLDSDGSFALVSKLTVDKSRWQQGNVFSCSVMHEALHNHYTQKSLSLSPGK

SEQ ID NO: 327 - protein, 475 aa, Artificial Sequence
  Description of Artificial Sequence: Synthetic polypeptide
DIQMTQSPSSLSASVGDRVTITCRARQSIGTAIHWYQQKPGKAPKLLIYYASESISGVPSRFSGSGSGTDFTLTISSVQPEDFATYYCQQSGSWPYTFGQGTKLEIKGGSEGKSSGSGSESKSTGGSEVQLVESGGGLVKPGGSLRLSCAASGFTFSRYNMNWVRQAPGKGLEWVSSISTSSNYIYYADSVKGRFTFSRDNAKNSLDLQMSGLRAEDTAIYYCTRGWGPFDYWGQGTLVTVSSEPKSSDKTHTCPPCPAPEAAGGPSVFLFPPKPKDTLMISRTPEVTCVVVSVSHEDPEVKFNWYVDGVEVHNAKTKPREEQYNSTYRVVSVLTVLHQDWLNGKEYKCKVSNKALPAPIEKTISKAKGQPREPQVYVYPPSREEMTKNQVSLTCLVKGFYPSDIAVEWESNGQPENNYKTTPPVLDSDGSFALVSKLTVDKSRWQQGNVFSCSVMHEALHNHYTQKSLSLSPGK

SEQ ID NO: 328 - protein, 243 aa, Artificial Sequence
  Description of Artificial Sequence: Synthetic polypeptide
EVQLVESGGGLVKPGGSLRLSCAASGFTFSRYNMNWVRQAPGKGLEWVSSISTSSNYIYYADSVKGRFTFSRDNAKNSLDLQMSGLRAEDTAIYYCTRGWGPFDYWGQGTLVTVSSGGSEGKSSGSGSESKSTGGSDIQMTQSPSSLSASVGDRVTITCRARQSIGTAIHWYQQKPGKAPKLLIYYASESISGVPSRFSGSGSGTDFTLTISSVQPEDFATYYCQQSGSWPYTFGQGTKLEIK

SEQ ID NO: 329 - protein, 243 aa, Artificial Sequence
  Description of Artificial Sequence: Synthetic polypeptide
DIQMTQSPSSLSASVGDRVTITCRARQSIGTAIHWYQQKPGKAPKLLIYYASESISGVPSRFSGSGSGTDFTLTISSVQPEDFATYYCQQSGSWPYTFGQGTKLEIKGGSEGKSSGSGSESKSTGGSEVQLVESGGGLVKPGGSLRLSCAASGFTFSRYNMNWVRQAPGKGLEWVSSISTSSNYIYYADSVKGRFTFSRDNAKNSLDLQMSGLRAEDTAIYYCTRGWGPFDYWGQGTLVTVSS

SEQ ID NO: 330 - protein, 243 aa, Artificial Sequence
  Description of Artificial Sequence: Synthetic polypeptide
EVQLVESGGGLVKPGGSLRLSCAASGFTFSRYNMNWVRQAPGKGLEWVSSISTSSNYIYYADSVKGRFTFSRDNAKNSLDLQMSGLRAEDTAIYYCTRGWGPFDYWGQGTLVTVSSGGSEGKSSGSGSESKSTGGSDIQMTQSPSSLSASVGDRVTITCRARQSIGTAIHWYQQKPGKAPKLLIKYASESISGVPSRFSGSGSGTDFTLTISSLQPEDFATYYCQQSGSWPYTFGQGTKLEIK

SEQ ID NO: 331 - protein, 243 aa, Artificial Sequence
  Description of Artificial Sequence: Synthetic polypeptide
DIQMTQSPSSLSASVGDRVTITCRARQSIGTAIHWYQQKPGKAPKLLIKYASESISGVPSRFSGSGSGTDFTLTISSLQPEDFATYYCQQSGSWPYTFGQGTKLEIKGGSEGKSSGSGSESKSTGGSEVQLVESGGGLVKPGGSLRLSCAASGFTFSRYNMNWVRQAPGKGLEWVSSISTSSNYIYYADSVKGRFTFSRDNAKNSLDLQMSGLRAEDTAIYYCTRGWGPFDYWGQGTLVTVSS

SEQ ID NO: 332 - protein, 243 aa, Artificial Sequence
  Description of Artificial Sequence: Synthetic polypeptide
EVQLVESGGGLVKPGGSLRLSCAASGFTFSRYNMNWVRQAPGKGLEWVSSISTSSNYIYYADSVKGRFTFSRDNAKNSLDLQMSGLRAEDTAIYYCTRGWGPFDYWGQGTLVTVSSGGSEGKSSGSGSESKSTGGSDIQMTQSPSSLSASVGDRVTITCRARQSIGTAIHWYQQKPGKAPKLLIKYASESISGVPSRFSGSGSGTDFTLTISSVQPEDFATYYCQQSGSWPYTFGQGTKLEIK

SEQ ID NO: 333 - protein, 243 aa, Artificial Sequence
  Description of Artificial Sequence: Synthetic polypeptide
DIQMTQSPSSLSASVGDRVTITCRARQSIGTAIHWYQQKPGKAPKLLIKYASESISGVPSRFSGSGSGTDFTLTISSVQPEDFATYYCQQSGSWPYTFGQGTKLEIKGGSEGKSSGSGSESKSTGGSEVQLVESGGGLVKPGGSLRLSCAASGFTFSRYNMNWVRQAPGKGLEWVSSISTSSNYIYYADSVKGRFTFSRDNAKNSLDLQMSGLRAEDTAIYYCTRGWGPFDYWGQGTLVTVSS

SEQ ID NO: 334 - protein, 243 aa, Artificial Sequence
  Description of Artificial Sequence: Synthetic polypeptide
EVQLVESGGGLVKPGGSLRLSCAASGFTFSRYNMNWVRQAPGKGLEWVSSISTSSNYIYYADSVKGRFTFSRDNAKNSLDLQMSGLRAEDTAIYYCTRGWGPFDYWGQGTLVTVSSGGSEGKSSGSGSESKSTGGSDIQMTQSPSSLSASVGDRVTITCRARQSIGTAIHWYQQKPGKAPKLLIYYASESISGVPSRFSGSGSGTDFTLTISSLQPEDFATYYCQQSGSWPYTFGQGTKLEIK

SEQ ID NO: 335 - protein, 243 aa, Artificial Sequence
  Description of Artificial Sequence: Synthetic polypeptide
DIQMTQSPSSLSASVGDRVTITCRARQSIGTAIHWYQQKPGKAPKLLIYYASESISGVPSRFSGSGSGTDFTLTISSLQPEDFATYYCQQSGSWPYTFGQGTKLEIKGGSEGKSSGSGSESKSTGGSEVQLVESGGGLVKPGGSLRLSCAASGFTFSRYNMNWVRQAPGKGLEWVSSISTSSNYIYYADSVKGRFTFSRDNAKNSLDLQMSGLRAEDTAIYYCTRGWGPFDYWGQGTLVTVSS

SEQ ID NO: 336 - protein, 243 aa, Artificial Sequence
  Description of Artificial Sequence: Synthetic polypeptide
EVQLVESGGGLVKPGGSLRLSCAASGFTFSRYNMNWVRQAPGKGLEWVSSISTSSNYIYYADSVKGRFTFSRDNAKNSLDLQMSGLRAEDTAIYYCTRGWGPFDYWGQGTLVTVSSGGSEGKSSGSGSESKSTGGSDILLTQSPGILSVSPGERVSFSCRARQSIGTAIHWYQQRTNGSPRLLIKYASESISGIPSRFSGSGSGTDFTLTINSVESEDIADYYCQQSGSWPYTFGGGTKLEIK

SEQ ID NO: 337 - protein, 243 aa, Artificial Sequence
  Description of Artificial Sequence: Synthetic polypeptide
DILLTQSPGILSVSPGERVSFSCRARQSIGTAIHWYQQRTNGSPRLLIKYASESISGIPSRFSGSGSGTDFTLTINSVESEDIADYYCQQSGSWPYTFGGGTKLEIKGGSEGKSSGSGSESKSTGGSEVQLVESGGGLVKPGGSLRLSCAASGFTFSRYNMNWVRQAPGKGLEWVSSISTSSNYIYYADSVKGRFTFSRDNAKNSLDLQMSGLRAEDTAIYYCTRGWGPFDYWGQGTLVTVSS

SEQ ID NO: 338 - protein, 432 aa, Artificial Sequence
  Description of Artificial Sequence: Synthetic polypeptide
FKIPIEELEDRVFVNCNTSITWVEGTVGTLLSDITRLDLGKRILDPRGIYRCNGTDIYKDKESTVQVHYRMGSADDAKKDAAKKDDAKKDDAKKDGSDGNEEMGGITQTPYKVSISGTTVILTCPQYPGSEILWQHNDKNIGGDEDDKNIGSDEDHLSLKEFSELEQSGYYVCYPRGSKPEDANFYLYLRARVSPPSPAPELLGGPSVFLFPPKPKDTLMISRTPEVTCVVVDVSHEDPEVKFNWYVDGVEVHNAKTKPREEQYNSTYRVVSVLTVLHQDWLNGKEYKCKVSNKALPAPIEKTISKAKGQPREPQVYTLPPSRDELTKNQVSLTCLVKGFYPSDIAVEWESNGQPENNYKTTPPVLDSDGSFFLYSKLTVDKSRWQQGNVFSCSVMHEALHNHYTQKSLSLSPGKGGGLNDIFEAQKIEWHE

SEQ ID NO: 339 - protein, 426 aa, Artificial Sequence
  Description of Artificial Sequence: Synthetic polypeptide
QDGNEEMGGITQTPYKVSISGTTVILTCPQYPGSEILWQHNDKNIGGDEDDKNIGSDEDHLSLKEFSELEQSGYYVCYPRGSKPEDANFYLYLRARVGSADDAKKDAAKKDDAKKDDAKKDGSQSIKGNHLVKVYDYQEDGSVLLTCDAEAKNITWFKDGKMIGFLTEDKKKWNLGSNAKDPRGMYQCKGSQNKSKPLQVYYRMGSGSLGGPSVFLFPPKPKDTLMISRTPEVTCVVVDVSQEDPEVQFNWYVDGVEVHNAKTKPREEQFNSTYRVVSVLTVLHQDWLNGKEYKCKVSNKGLPSSIEKTISKAKGQPREPQVYTFPPSQEEMTKNQVSLRCLVKGFYPSDIAVEWESNGQPENNYKTTKPVLDSDGSFRLESRLTVDKSRWQEGNVFSCSVMHEALHNHYTQKSLSLSGGHHHHHH

SEQ ID NO: 340 - protein, 805 aa, Artificial Sequence
  Description of Artificial Sequence: Synthetic polypeptide
QDGNEEMGGITQTPYKVSISGTTVILTCPQYPGSEILWQHNDKNIGGDEDDKNIGSDEDHLSLKEFSELEQSGYYVCYPRGSKPEDANFYLYLRARVGSADDAKKDAAKKDDAKKDDAKKDGSQSIKGNHLVKVYDYQEDGSVLLTCDAEAKNITWFKDGKMIGFLTEDKKKWNLGSNAKDPRGMYQCKGSQNKSKPLQVYYRMGGGSDAHKSEVAHRFKDLGEENFKALVLIAFAQYLQQSPFEDHVKLVNEVTEFAKTCVADESAENCDKSLHTLFGDKLCTVATLRETYGEMADCCAKQEPERNECFLQHKDDNPNLPRLVRPEVDVMCTAFHDNEETFLKKYLYEIARRHPYFYAPELLFFAKRYKAAFTECCQAADKAACLLPKLDELRDEGKASSAKQRLKCASLQKFGERAFKAWAVARLSQRFPKAEFAEVSKLVTDLTKVHTECCHGDLLECADDRADLAKYICENQDSISSKLKECCEKPLLEKSHCIAEVENDEMPADLPSLAADFVESKDVCKNYAEAKDVFLGMFLYEYARRHPDYSVVLLLRLAKTYETTLEKCCAAADPHECYAKVFDEFKPLVEEPQNLIKQNCELFEQLGEYKFQNALLVRYTKKVPQVSTPTLVEVSRNLGKVGSKCCKHPEAKRMPCAEDYLSVVLNQLCVLHEKTPVSDRVTKCCTESLVNRRPCFSALEVDETYVPKEFNAETFTFHADICTLSEKERQIKKQTALVELVKHKPKATKEQLKAVMDDFAAFVEKCCKADDKETCFAEEGKKLVAASQAALGLGGGSHHHHHHHH

SEQ ID NO: 341 - protein, 9 aa, Homo sapiens
PQYPGSEIL

SEQ ID NO: 342 - protein, 262 aa, Artificial Sequence
  Description of Artificial Sequence: Synthetic polypeptide
EVQLVESGGGLVKPGGSLRLSCAASGFTFSRYNMNWVRQAPGKGLEWVSSISTSSNYIYYADSVKGRFTFSRDNAKNSLDLQMSGLRAEDTAIYYCTRGWGPFDYWGQGTLVTVSSGTEGKSSGSGSESKSTDILLTQSPGILSVSPGERVSFSCRARQSIGTAIHWYQQRTNGSPRLLIKYASESISGIPSRFSGSGSGTDFTLTINSVESEDIADYYCQQSNSWPYTFGGGTKLEIKGPGGQHHHHHHGAYPYDVPDYAS

SEQ ID NO: 343 - protein, 262 aa, Artificial Sequence
  Description of Artificial Sequence: Synthetic polypeptide
EVQLVESGGGLVKPGGSLRLSCAASGFTFSRYNMNWVRQAPGKGLEWVSSISTSSNYIYYADSVKGRFTFSRDNAKNSLDLQMSGLRAEDTAIYYCTRGWGPFDYWGQGTLVTVSSGTEGKSSGSGSESKSTDIQMTQSPSSLSASVGDRVTITCRARQSIGTAIHWYQQKPGKAPKLLIYYASESISGVPSRFSGSGSGTDFTLTISSLQPEDFATYYCQQSNSWPYTFGQGTKLEIKGPGGQHHHHHHGAYPYDVPDYAS

SEQ ID NO: 344 - protein, 262 aa, Artificial Sequence
  Description of Artificial Sequence: Synthetic polypeptide
EVQLVESGGGLVKPGGSLRLSCAASGFTFSRYNMNWVRQAPGKGLEWVSSISTSSNYIYYADSVKGRFTFSRDNAKNSLDLQMSGLRAEDTAIYYCTRGWGPFDYWGQGTLVTVSSGTEGKSSGSGSESKSTDIQMTQSPSSLSASVGDRVTITCRARQSIGTAIHWYQQKPGKAPKLLIKYASESISGVPSRFSGSGSGTDFTLTISSLQPEDFATYYCQQSNSWPYTFGQGTKLEIKGPGGQHHHHHHGAYPYDVPDYAS

SEQ ID NO: 345 - protein, 262 aa, Artificial Sequence
  Description of Artificial Sequence: Synthetic polypeptide
EVQLVESGGGLVKPGGSLRLSCAASGFTFSRYNMNWVRQAPGKGLEWVSSISTSSNYIYYADSVKGRFTFSRDNAKNSLDLQMSGLRAEDTAIYYCTRGWGPFDYWGQGTLVTVSSGTEGKSSGSGSESKSTDIQMTQSPSSLSASVGDRVTITCRARQSIGTAIHWYQQKPGKAPKLLIKYASESISGVPSRFSGSGSGTDFTLTISSVQPEDFATYYCQQSNSWPYTFGQGTKLEIKGPGGQHHHHHHGAYPYDVPDYAS

SEQ ID NO: 346 - protein, 262 aa, Artificial Sequence
  Description of Artificial Sequence: Synthetic polypeptide
EVQLVESGGGLVKPGGSLRLSCAASGFTFSRYNMNWVRQAPGKGLEWVSSISTSSNYIYYADSVKGRFTFSRDNAKNSLDLQMSGLRAEDTAIYYCTRGWGPFDYWGQGTLVTVSSGTEGKSSGSGSESKSTDIQMTQSPSSLSASVGDRVTITCRARQSIGTAIHWYQQKPGKAPKLLIYYASESISGVPSRFSGSGSGTDFTLTISSVQPEDFATYYCQQSGSWPYTFGQGTKLEIKGPGGQHHHHHHGAYPYDVPDYAS

SEQ ID NO: 347 - protein, 262 aa, Artificial Sequence
  Description of Artificial Sequence: Synthetic polypeptide
EVQLVESGGGLVKPGGSLRLSCAASGFTFSRYNMNWVRQAPGKGLEWVSSISTSSNYIYYADSVKGRFTFSRDNAKNSLDLQMSGLRAEDTAIYYCTRGWGPFDYWGQGTLVTVSSGTEGKSSGSGSESKSTDIQMTQSPSSLSASVGDRVTITCRARQSIGTAIHWYQQKPGKAPKLLIKYASESISGVPSRFSGSGSGTDFTLTISSLQPEDFATYYCQQSGSWPYTFGQGTKLEIKGPGGQHHHHHHGAYPYDVPDYAS

SEQ ID NO: 348 - protein, 262 aa, Artificial Sequence
  Description of Artificial Sequence: Synthetic polypeptide
EVQLVESGGGLVKPGGSLRLSCAASGFTFSRYNMNWVRQAPGKGLEWVSSISTSSNYIYYADSVKGRFTFSRDNAKNSLDLQMSGLRAEDTAIYYCTRGWGPFDYWGQGTLVTVSSGTEGKSSGSGSESKSTDIQMTQSPSSLSASVGDRVTITCRARQSIGTAIHWYQQKPGKAPKLLIKYASESISGVPSRFSGSGSGTDFTLTISSVQPEDFATYYCQQSGSWPYTFGQGTKLEIKGPGGQHHHHHHGAYPYDVPDYAS

SEQ ID NO: 349 - protein, 262 aa, Artificial Sequence
  Description of Artificial Sequence: Synthetic polypeptide
EVQLVESGGGLVKPGGSLRLSCAASGFTFSRYNMNWVRQAPGKGLEWVSSISTSSNYIYYADSVKGRFTFSRDNAKNSLDLQMSGLRAEDTAIYYCTRGWGPFDYWGQGTLVTVSSGTEGKSSGSGSESKSTDIQMTQSPSSLSASVGDRVTITCRARQSIGTAIHWYQQKPGKAPKLLIYYASESISGVPSRFSGSGSGTDFTLTISSLQPEDFATYYCQQSGSWPYTFGQGTKLEIKGPGGQHHHHHHGAYPYDVPDYAS

SEQ ID NO: 350 - protein, 262 aa, Artificial Sequence
  Description of Artificial Sequence: Synthetic polypeptide
EVQLVESGGGLVKPGGSLRLSCAASGFTFSRYNMNWVRQAPGKGLEWVSSISTSSNYIYYADSVKGRFTFSRDNAKNSLDLQMSGLRAEDTAIYYCTRGWGPFDYWGQGTLVTVSSGTEGKSSGSGSESKSTDILLTQSPGILSVSPGERVSFSCRARQSIGTAIHWYQQRTNGSPRLLIKYASESISGIPSRFSGSGSGTDFTLTINSVESEDIADYYCQQSGSWPYTFGGGTKLEIKGPGGQHHHHHHGAYPYDVPDYAS

SEQ ID NO: 351 - protein, 479 aa, Artificial Sequence
  Description of Artificial Sequence: Synthetic polypeptide
EIVLTQSPATLSLSPGERATLSCRASESVEYFGTSLMHWYQQKPGQPPRLLIYAASNVESGIPARFSGSGSGTDFTLTISSVEPEDFAVYFCQQTRKVPYTFGGGTKVEIKGGSEGKSSGSGSESKSTGGSQVQLQESGPGLVKPSQTLSLTCTVSGNSITSDYAWNWIRQFPGKRLEWIGYISYSGSTTYNPSLKSRVTISRDTSKNQFSLKLSSVTAADTAVYYCATGYYYGSGFWGQGTLVTVSSEPKSSDKTHTCPPCPAPEAAGGPSVFLFPPKPKDTLMISRTPEVTCVVVSVSHEDPEVKFNWYVDGVEVHNAKTKPREEQYNSTYRVVSVLTVLHQDWLNGKEYKCKVSNKALPAPIEKTISKAKGQPREPQVYVLPPSREEMTKNQVSLLCLVKGFYPSDIAVEWESNGQPENNYLTWPPVLDSDGSFFLYSKLTVDKSRWQQGNVFSCSVMHEALHNHYTQKSLSLSPG

SEQ ID NO: 352 - protein, 482 aa, Artificial Sequence
  Description of Artificial Sequence: Synthetic polypeptide
EIVLTQSPSFLSASVGDRVTITCRASQGISSYLSWYQQKPGKAPKLLIYATSTLQSGVPSRFSGSGSGTEFTLTISSLQPEDFATYYCQQLNSYPRTFGQGTKVEIKGGSEGKSSGSGSESKSTGGSEVQLVESGGGLVQPGGSLRLSCAASGFTFSSYWMTWVRQAPGKGLEWVANIKQDGSERYYVDSVKGRFTISRDNAKNSLYLQMNSLRAEDTAVYYCARDQNYDILTGHYGMDVWGQGTTVTVSSEPKSSDKTHTCPPCPAPEAAGGPSVFLFPPKPKDTLMISRTPEVTCVVVSVSHEDPEVKFNWYVDGVEVHNAKTKPREEQYNSTYRVVSVLTVLHQDWLNGKEYKCKVSNKALPAPIEKTISKAKGQPREPQVYVLPPSREEMTKNQVSLLCLVKGFYPSDIAVEWESNGQPENNYLTWPPVLDSDGSFFLYSKLTVDKSRWQQGNVFSCSVMHEALHNHYTQKSLSLSPG

SEQ ID NO: 353 - protein, 481 aa, Artificial Sequence
  Description of Artificial Sequence: Synthetic polypeptide
QSVLTQPPSVSVAPGQTASITCGGDNIGSKSVHWYQQKPGQAPVLVVYDNSDRPSGIPERFSGSNSGTTATLTISRVEAGDEADYYCQVWDSSSDHPVVFGGGTKVTVLGGSEGKSSGSGSESKSTGGSQVQLVESGGGVVQPGRSLRLSCAASGFTFSYYGMHWVRQAPGKGLEWVAFISYDGSNKYYADSVKGRFTISRDNSKNTLYLQMNSLRAEDTAVYYCAHLPYSGSYWAFDYWGQGTQVTVSSEPKSSDKTHTCPPCPAPEAAGGPSVFLFPPKPKDTLMISRTPEVTCVVVSVSHEDPEVKFNWYVDGVEVHNAKTKPREEQYNSTYRVVSVLTVLHQDWLNGKEYKCKVSNKALPAPIEKTISKAKGQPREPQVYVLPPSREEMTKNQVSLLCLVKGFYPSDIAVEWESNGQPENNYLTWPPVLDSDGSFFLYSKLTVDKSRWQQGNVFSCSVMHEALHNHYTQKSLSLSPG

SEQ ID NO: 354 - protein, 454 aa, Artificial Sequence
  Description of Artificial Sequence: Synthetic polypeptide
QVQLQESGPGLVKPSETLSLTCTVSGGSISSYYWSWIRQPPGKGLEWIGYIYYSGSTNYNPSLKSRVTISVDTSKNQFSLKLSSVTAADTAVYYCAGTTIFGVVTPNFYYGMDVWGQGTTVTVSSASTKGPSVFPLAPSSKSTSGGTAALGCLVKDYFPEPVTVSWNSGALTSGVHTFPAVLQSSGLYSLSSVVTVPSSSLGTQTYICNVNHKPSNTKVDKKVEPKSCDKTHTCPPCPAPEAAGGPSVFLFPPKPKDTLMISRTPEVTCVVVSVSHEDPEVKFNWYVDGVEVHNAKTKPREEQYNSTYRVVSVLTVLHQDWLNGKEYKCKVSNKALPAPIEKTISKAKGQPREPQVYVLPPSREEMTKNQVSLLCLVKGFYPSDIAVEWESNGQPENNYLTWPPVLDSDGSFFLYSKLTVDKSRWQQGNVFSCSVMHEALHNHYTQKSLSLSPG

SEQ ID NO: 355 - protein, 448 aa, Artificial Sequence
  Description of Artificial Sequence: Synthetic polypeptide
QVQLQESGPGLVKPSETLSLTCTVSGGSISSYYWSWLRQPAGSGLEWIGRLYVSGFTNYNPSLKSRVTLSLDPSRNQLSLKLSSVTAADTAVYYCAGDSGNYWGWFDPWGQGTLVTVSSASTKGPSVFPLAPSSKSTSGGTAALGCLVKDYFPEPVTVSWNSGALTSGVHTFPAVLQSSGLYSLSSVVTVPSSSLGTQTYICNVNHKPSNTKVDKKVEPKSCDKTHTCPPCPAPEAAGGPSVFLFPPKPKDTLMISRTPEVTCVVVSVSHEDPEVKFNWYVDGVEVHNAKTKPREEQYNSTYRVVSVLTVLHQDWLNGKEYKCKVSNKALPAPIEKTISKAKGQPREPQVYVLPPSREEMTKNQVSLLCLVKGFYPSDIAVEWESNGQPENNYLTWPPVLDSDGSFFLYSKLTVDKSRWQQGNVFSCSVMHEALHNHYTQKSLSLSPG

SEQ ID NO: 356 - protein, 452 aa, Artificial Sequence
  Description of Artificial Sequence: Synthetic polypeptide
EVQLVESGGGVVQPGRSLRLSCVASGFTFSSYDIHWVRQAPGKGLEWVAIISYDGSKKDYTDSVKGRFTISRDNSKNTLYLQMDSLRVEDSAVYSCARESGWSHYYYYGMDVWGQGTMVTVSSASTKGPSVFPLAPSSKSTSGGTAALGCLVKDYFPEPVTVSWNSGALTSGVHTFPAVLQSSGLYSLSSVVTVPSSSLGTQTYICNVNHKPSNTKVDKKVEPKSCDKTHTCPPCPAPEAAGGPSVFLFPPKPKDTLMISRTPEVTCVVVSVSHEDPEVKFNWYVDGVEVHNAKTKPREEQYNSTYRVVSVLTVLHQDWLNGKEYKCKVSNKALPAPIEKTISKAKGQPREPQVYVLPPSREEMTKNQVSLLCLVKGFYPSDIAVEWESNGQPENNYLTWPPVLDSDGSFFLYSKLTVDKSRWQQGNVFSCSVMHEALHNHYTQKSLSLSPG

SEQ ID NO: 357 - protein, 484 aa, Artificial Sequence
  Description of Artificial Sequence: Synthetic polypeptide
SSELTQPPSVSVAPGQTARITCGGNNIGSKSVHWYQQKPGQAPVLVVYDDSDRPSGIPERFSGSNSGNTATLTISRVEAGDEADYYCQVWDSSSDHVVFGGGTKLTVLGGSEGKSSGSGSESKSTGGSQVQLVESGGGLVQPGGSLRLSCAASGFTFSHYAMSWVRQAPGKGLEWVSTIGGSGGSTYYADSVKGRFTISRDNSKNTLYLQMNSLRAEDTAVYYCAKPHIVMVTALLYDGMDVWGQGTMVTVSSEPKSSDKTHTCPPCPAPEAAGGPSVFLFPPKPKDTLMISRTPEVTCVVVSVSHEDPEVKFNWYVDGVEVHNAKTKPREEQYNSTYRVVSVLTVLHQDWLNGKEYKCKVSNKALPAPIEKTISKAKGQPREPQVYVLPPSREEMTKNQVSLLCLVKGFYPSDIAVEWESNGQPENNYLTWPPVLDSDGSFFLYSKLTVDKSRWQQGNVFSCSVMHEALHNHYTQKSLSLSPG

SEQ ID NO: 358 - protein, 445 aa, Artificial Sequence
  Description of Artificial Sequence: Synthetic polypeptide
EVQLVESGGGLVKPGGSLRLSCAASGFTFSRYNMNWVRQAPGKGLEWVSSISTSSNYIYYADSVKGRFTFSRDNAKNSLDLQMSGLRAEDTAIYYCTRGWGPFDYWGQGTLVTVSSASTKGPSVFPLAPSSKSTSGGTAALGCLVKDYFPEPVTVSWNSGALTSGVHTFPAVLQSSGLYSLSSVVTVPSSSLGTQTYICNVNHKPSNTKVDKKVEPKSCDKTHTCPPCPAPEAAGGPSVFLFPPKPKDTLMISRTPEVTCVVVSVSHEDPEVKFNWYVDGVEVHNAKTKPREEQYNSTYRVVSVLTVLHQDWLNGKEYKCKVSNKALPAPIEKTISKAKGQPREPQVYVYPPSREEMTKNQVSLTCLVKGFYPSDIAVEWESNGQPENNYKTTPPVLDSDGSFALVSKLTVDKSRWQQGNVFSCSVMHEALHNHYTQKSLSLSPG

SEQ ID NO: 359 - protein, 449 aa, Artificial Sequence
  Description of Artificial Sequence: Synthetic polypeptide
QVQLQQSGPRLVRPSQTLSLTCAISGDSVFNNNAAWSWIRQSPSRGLEWLGRTYYRSKWLYDYAVSVKSRITVNPDTSRNQFTLQLNSVTPEDTALYYCARGYSSSFDYWGQGTLVTVSSASTKGPSVFPLAPSSKSTSGGTAALGCLVKDYFPEPVTVSWNSGALTSGVHTFPAVLQSSGLYSLSSVVTVPSSSLGTQTYICNVNHKPSNTKVDKKVEPKSCDKTHTCPPCPAPEAAGGPSVFLFPPKPKDTLMISRTPEVTCVVVSVSHEDPEVKFNWYVDGVEVHNAKTKPREEQYNSTYRVVSVLTVLHQDWLNGKEYKCKVSNKALPAPIEKTISKAKGQPREPQVYVYPPSREEMTKNQVSLTCLVKGFYPSDIAVEWESNGQPENNYKTTPPVLDSDGSFALVSKLTVDKSRWQQGNVFSCSVMHEALHNHYTQKSLSLSPG

SEQ ID NO: 360 - protein, 474 aa, Artificial Sequence
  Description of Artificial Sequence: Synthetic polypeptide
DIQMTQSPSSLSASVGDRVTITCRARQSIGTAIHWYQQKPGKAPKLLIKYASESISGVPSRFSGSGSGTDFTLTISSLQPEDFATYYCQQSGSWPYTFGQGTKLEIKGGSEGKSSGSGSESKSTGGSEVQLVESGGGLVKPGGSLRLSCAASGFTFSRYNMNWVRQAPGKGLEWVSSISTSSNYIYYADSVKGRFTFSRDNAKNSLDLQMSGLRAEDTAIYYCTRGWGPFDYWGQGTLVTVSSEPKSSDKTHTCPPCPAPEAAGGPSVFLFPPKPKDTLMISRTPEVTCVVVSVSHEDPEVKFNWYVDGVEVHNAKTKPREEQYNSTYRVVSVLTVLHQDWLNGKEYKCKVSNKALPAPIEKTISKAKGQPREPQVYVYPPSREEMTKNQVSLTCLVKGFYPSDIAVEWESNGQPENNYKTTPPVLDSDGSFALVSKLTVDKSRWQQGNVFSCSVMHEALHNHYTQKSLSLSPG

SEQ ID NO: 361 - protein, 455 aa, Artificial Sequence
  Description of Artificial Sequence: Synthetic polypeptide
QVQLQESGPGLVKPSETLSLTCTVSGGSISSYYWSWIRQPPGKGLEWIGYIYYSGSTNYNPSLKSRVTISVDTSKNQFSLKLSSVTAADTAVYYCAGTTIFGVVTPNFYYGMDVWGQGTTVTVSSASTKGPSVFPLAPSSKSTSGGTAALGCLVKDYFPEPVTVSWNSGALTSGVHTFPAVLQSSGLYSLSSVVTVPSSSLGTQTYICNVNHKPSNTKVDKKVEPKSCDKTHTCPPCPAPEAAGGPSVFLFPPKPKDTLMISRTPEVTCVVVSVSHEDPEVKFNWYVDGVEVHNAKTKPREEQYNSTYRVVSVLTVLHQDWLNGKEYKCKVSNKALPAPIEKTISKAKGQPREPQVYVLPPSREEMTKNQVSLLCLVKGFYPSDIAVEWESNGQPENNYLTWPPVLDSDGSFFLYSKLTVDKSRWQQGNVFSCSVMHEALHNHYTQKSLSLSPGK

SEQ ID NO: 362 - protein, 475 aa, Artificial Sequence
  Description of Artificial Sequence: Synthetic polypeptide
DIQMTQSPSSLSASVGDRVTITCRARQSIGTAIHWYQQKPGKAPKLLIKYASESISGVPSRFSGSGSGTDFTLTISSLQPEDFATYYCQQSGSWPYTFGQGTKLEIKGGSEGKSSGSGSESKSTGGSEVQLVESGGGLVKPGGSLRLSCAASGFTFSRYNMNWVRQAPGKGLEWVSSISTSSNYIYYADSVKGRFTFSRDNAKNSLDLQMSGLRAEDTAIYYCTRGWGPFDYWGQGTLVTVSSEPKSSDKTHTCPPCPAPEAAGGPSVFLFPPKPKDTLMISRTPEVTCVVVSVSHEDPEVKFNWYVDGVEVHNAKTKPREEQYNSTYRVVSVLTVLHQDWLNGKEYKCKVSNKALPAPIEKTISKAKGQPREPQVYVYPPSREEMTKNQVSLTCLVKGFYPSDIAVEWESNGQPENNYKTTPPVLDSDGSFALVSKLTVDKSRWQQGNVFSCSVMHEALHNHYTQKSLSLSPGK

SEQ ID NO: 363 - DNA, 1437 bp, Artificial Sequence
  Description of Artificial Sequence: Synthetic polynucleotide
gagattgttctcacccaatccccagctactctctctctttcacccggtgagcgggcaaccctctcctgtagagccagcgagagcgtggagtattttggcacatccctgatgcactggtatcagcaaaaaccaggacaaccccccagactcctcatatatgccgcctcaaatgtcgagagtgggatacctgcacggttttcaggaagcggcagcggtactgacttcacattgactatatcctctgtagagccagaggattttgcagtctacttctgccagcaaactaggaaggttccatatacttttgggggcggtacaaaagttgagataaagggcggctccgagggcaagagcagcggcagcggcagcgagagcaagagcaccggcggcagccaagtacagctccaggagtcaggacctgggctcgtcaaaccatctcagacattgtccctgacatgcacagtttccggcaacagtattacttccgactatgcttggaattggatcaggcaattcccaggaaagcggctcgagtggataggttatatttcttactctggatctactacctacaatcccagtttgaagtctcgcgtgacaattagccgggacacatcaaaaaatcaattctcacttaaacttagttctgtaaccgctgccgatacagccgtgtactactgcgccactggttattattatggaagcggattttgggggcaaggaactttggtgaccgtctcttccgagcccaaatctagcgacaaaactcacacatgtccaccgtgcccagcacctgaagcagcagggggaccgtcagtcttcctcttccccccaaaacccaaggacaccctcatgatctcccggacccctgaggtcacatgcgtggtggtgagcgtgagccacgaagaccctgaggtcaagttcaactggtacgtggacggcgtggaggtgcataatgccaagacaaagccgcgggaggagcagtacaacagcacgtaccgtgtggtcagcgtcctcaccgtcctgcaccaggactggctgaatggcaaggagtacaagtgcaaggtctccaacaaagccctcccagcccccatcgagaaaaccatctccaaagccaaagggcagccccgagaaccacaggtgtacgtgctgcccccatcccgggaggagatgaccaagaaccaggtcagcctgctgtgcctggtcaaaggcttctatcccagcgacatcgccgtggagtgggagagcaatgggcagccggagaacaactacctcacctggcctcccgtgctggactccgacggctccttcttcctctacagcaagctcaccgtggacaagtctagatggcagcaggggaacgtcttctcatgctccgtgatgcatgaggctctgcacaaccactacacgcagaagagcctctccctgtctccgggt

SEQ ID NO: 364 - DNA, 1356 bp, Artificial Sequence
  Description of Artificial Sequence: Synthetic polynucleotide
gaggtacaacttgtcgaaagtggcggtggagtcgtccagcctgggcgatcacttcgcctctcctgtgtagcctctggtttcactttctcatcttacgacatacactgggtccgccaggcacctggtaaggggctggagtgggttgccatcattagttacgatggctccaaaaaagattacaccgatagcgtaaagggcagatttaccatttccagggataattcaaagaacaccctgtatctgcaaatggacagcctccgcgtcgaagactctgcagtttatagctgtgccagggagtcaggctggtcccattattactattatggtatggacgtttggggccagggaaccatggtcactgttagttcagcctccaccaagggcccatcggtcttccccctggcaccctcctccaagagcacctctgggggcacagcggccctgggctgcctggtcaaggactacttccccgaaccggtgacggtgtcgtggaactcaggcgccctgaccagcggcgtgcacaccttcccggctgtcctacagtcctcaggactctactccctcagcagcgtggtgaccgtgccctccagcagcttgggcacccagacctacatctgcaacgtgaatcacaagcccagcaacaccaaggtggacaagaaagttgagcccaaatcttgtgacaaaactcacacatgtccaccgtgcccagcacctgaagcagcagggggaccgtcagtcttcctcttccccccaaaacccaaggacaccctcatgatctcccggacccctgaggtcacatgcgtggtggtgagcgtgagccacgaagaccctgaggtcaagttcaactggtacgtggacggcgtggaggtgcataatgccaagacaaagccgcgggaggagcagtacaacagcacgtaccgtgtggtcagcgtcctcaccgtcctgcaccaggactggctgaatggcaaggagtacaagtgcaaggtctccaacaaagccctcccagcccccatcgagaaaaccatctccaaagccaaagggcagccccgagaaccacaggtgtacgtgctgcccccatcccgggaggagatgaccaagaaccaggtcagcctgctgtgcctggtcaaaggcttctatcccagcgacatcgccgtggagtgggagagcaatgggcagccggagaacaactacctcacctggcctcccgtgctggactccgacggctccttcttcctctacagcaagctcaccgtggacaagtctagatggcagcaggggaacgtcttctcatgctccgtgatgcatgaggctctgcacaaccactacacgcagaagagcctctccctgtctccgggt

SEQ ID NO: 365 - DNA, 1443 bp, Artificial Sequence
  Description of Artificial Sequence: Synthetic polynucleotide
cagagcgtacttacccagcctcccagcgtgtctgtagccccaggacagacagccagtattacatgcggtggtgacaatataggttccaaatccgtgcattggtaccagcagaagccagggcaagctcccgtgctcgtggtatatgataattccgaccgcccttccggcattcccgaacggtttagtggttcaaattcaggcaccacagcaactctgaccataagcagagtcgaagctggagacgaagccgactactactgtcaggtatgggactctagtagtgaccaccctgtcgtcttcggtgggggaaccaaagtgaccgttctgggcggctccgagggcaagagcagcggcagcggcagcgagagcaagagcaccggcggcagccaggtccagctcgtagaaagtgggggcggcgtagttcagccaggcaggagtctccggctgagttgtgcagccagcggctttactttttcctactatggaatgcactgggtacgtcaggcacccggcaaaggtttggagtgggtcgcattcatttcttatgatggatcaaataagtattatgccgatagtgtaaagggcagatttacaataagtcgagacaactcaaagaacactctctacctccaaatgaatagtcttcgggcagaggatactgcagtgtactattgtgctcatcttccttattccggttcttactgggcattcgattattgggggcaagggacacaagttaccgtgtctagcgagcccaaatctagcgacaaaactcacacatgtccaccgtgcccagcacctgaagcagcagggggaccgtcagtcttcctcttccccccaaaacccaaggacaccctcatgatctcccggacccctgaggtcacatgcgtggtggtgagcgtgagccacgaagaccctgaggtcaagttcaactggtacgtggacggcgtggaggtgcataatgccaagacaaagccgcgggaggagcagtacaacagcacgtaccgtgtggtcagcgtcctcaccgtcctgcaccaggactggctgaatggcaaggagtacaagtgcaaggtctccaacaaagccctcccagcccccatcgagaaaaccatctccaaagccaaagggcagccccgagaaccacaggtgtacgtgctgcccccatcccgggaggagatgaccaagaaccaggtcagcctgctgtgcctggtcaaaggcttctatcccagcgacatcgccgtggagtgggagagcaatgggcagccggagaacaactacctcacctggcctcccgtgctggactccgacggctccttcttcctctacagcaagctcaccgtggacaagtctagatggcagcaggggaacgtcttctcatgctccgtgatgcatgaggctctgcacaaccactacacgcagaagagcctctccctgtctccgggt

SEQ ID NO: 366 - DNA, 1452 bp, Artificial Sequence
  Description of Artificial Sequence: Synthetic polynucleotide
agcagcgaattgacccaaccaccttccgtcagcgtcgcaccagggcaaaccgcccgcatcacatgcggtgggaacaatataggaagcaaatctgtccactggtaccagcaaaaaccaggacaagcccctgttctggtcgtctatgatgacagcgacagaccaagtggtattcccgagagattctccggtagcaactctggaaatacagctactttgaccatctccagagttgaggctggtgacgaggcagattactattgccaggtctgggacagctccagcgaccacgtcgtattcggtggcgggaccaagctgactgtgctgggcggctccgagggcaagagcagcggcagcggcagcgagagcaagagcaccggcggcagccaggtgcagttggtagagtcaggagggggcctcgttcaacctggtggcagcctccgtttgtcttgtgctgccagtggatttactttcagtcactacgcaatgagctgggtgagacaagcacctggcaagggccttgagtgggtctccactatcggcggttcaggggggagcacttactacgctgactctgtaaaaggtcgctttactatatctagagataactctaaaaacacactctacttgcagatgaacagcctgcgagccgaagatacagccgtgtactactgcgccaagcctcatattgtaatggtcactgccctcttgtatgatggcatggatgtttggggccaagggacaatggtgacagtctcaagcgagcccaaatctagcgacaaaactcacacatgtccaccgtgcccagcacctgaagcagcagggggaccgtcagtcttcctcttccccccaaaacccaaggacaccctcatgatctcccggacccctgaggtcacatgcgtggtggtgagcgtgagccacgaagaccctgaggtcaagttcaactggtacgtggacggcgtggaggtgcataatgccaagacaaagccgcgggaggagcagtacaacagcacgtaccgtgtggtcagcgtcctcaccgtcctgcaccaggactggctgaatggcaaggagtacaagtgcaaggtctccaacaaagccctcccagcccccatcgagaaaaccatctccaaagccaaagggcagccccgagaaccacaggtgtacgtgctgcccccatcccgggaggagatgaccaagaaccaggtcagcctgctgtgcctggtcaaaggcttctatcccagcgacatcgccgtggagtgggagagcaatgggcagccggagaacaactacctcacctggcctcccgtgctggactccgacggctccttcttcctctacagcaagctcaccgtggacaagtctagatggcagcaggggaacgtcttctcatgctccgtgatgcatgaggctctgcacaaccactacacgcagaagagcctctccctgtctccgggt

SEQ ID NO: 367 - DNA, 1362 bp, Artificial Sequence
  Description of Artificial Sequence: Synthetic polynucleotide
caggttcaacttcaagaatccgggccaggtctggtcaagccttcagagactttgtcccttacttgcacagtgagcggtggctctatctcaagttactactggtcatggatacggcagcccccaggaaaggggcttgagtggattgggtacatttattactcagggtcaacaaactacaatccctccctcaaatcccgagtgacaattagtgtcgatacatctaaaaaccagttttccctgaaattgagctcagtcaccgcagctgatactgcagtctattattgtgctggcacaacaatcttcggggtagtaactccaaacttctactacgggatggacgtgtgggggcaaggaacaaccgtaacagtaagtagtgcctccaccaagggcccatcggtcttccccctggcaccctcctccaagagcacctctgggggcacagcggccctgggctgcctggtcaaggactacttccccgaaccggtgacggtgtcgtggaactcaggcgccctgaccagcggcgtgcacaccttcccggctgtcctacagtcctcaggactctactccctcagcagcgtggtgaccgtgccctccagcagcttgggcacccagacctacatctgcaacgtgaatcacaagcccagcaacaccaaggtggacaagaaagttgagcccaaatcttgtgacaaaactcacacatgtccaccgtgcccagcacctgaagcagcagggggaccgtcagtcttcctcttccccccaaaacccaaggacaccctcatgatctcccggacccctgaggtcacatgcgtggtggtgagcgtgagccacgaagaccctgaggtcaagttcaactggtacgtggacggcgtggaggtgcataatgccaagacaaagccgcgggaggagcagtacaacagcacgtaccgtgtggtcagcgtcctcaccgtcctgcaccaggactggctgaatggcaaggagtacaagtgcaaggtctccaacaaagccctcccagcccccatcgagaaaaccatctccaaagccaaagggcagccccgagaaccacaggtgtacgtgctgcccccatcccgggaggagatgaccaagaaccaggtcagcctgctgtgcctggtcaaaggcttctatcccagcgacatcgccgtggagtgggagagcaatgggcagccggagaacaactacctcacctggcctcccgtgctggactccgacggctccttcttcctctacagcaagctcaccgtggacaagtctagatggcagcaggggaacgtcttctcatgctccgtgatgcatgaggctctgcacaaccactacacgcagaagagcctctccctgtctccgggt

SEQ ID NO: 368 - DNA, 1356 bp, Artificial Sequence; identical to SEQ ID NO: 364
  Description of Artificial Sequence: Synthetic polynucleotide

SEQ ID NO: 369 - DNA, 1344 bp, Artificial Sequence
  Description of Artificial Sequence: Synthetic polynucleotide
caagtacaacttcaagagtctggccctgggcttgttaagccctcagagaccttgtcactgacctgtaccgtatcaggcgggtcaatttcatcttactactggagttggcttcgtcagcctgccggatctggactggagtggataggtagactgtatgtttccggctttacaaattacaacccatctttgaaaagccgtgtgactctcagcctcgacccttctcggaatcaactttcacttaaattgtcttctgttacagctgccgacactgcagtatattattgtgcaggggactcaggcaactattggggatggtttgatccttgggggcaggggaccctggtaaccgtgagttctgcctccaccaagggcccatcggtcttccccctggcaccctcctccaagagcacctctgggggcacagcggccctgggctgcctggtcaaggactacttccccgaaccggtgacggtgtcgtggaactcaggcgccctgaccagcggcgtgcacaccttcccggctgtcctacagtcctcaggactctactccctcagcagcgtggtgaccgtgccctccagcagcttgggcacccagacctacatctgcaacgtgaatcacaagcccagcaacaccaaggtggacaagaaagttgagcccaaatcttgtgacaaaactcacacatgtccaccgtgcccagcacctgaagcagcagggggaccgtcagtcttcctcttccccccaaaacccaaggacaccctcatgatctcccggacccctgaggtcacatgcgtggtggtgagcgtgagccacgaagaccctgaggtcaagttcaactggtacgtggacggcgtggaggtgcataatgccaagacaaagccgcgggaggagcagtacaacagcacgtaccgtgtggtcagcgtcctcaccgtcctgcaccaggactggctgaatggcaaggagtacaagtgcaaggtctccaacaaagccctcccagcccccatcgagaaaaccatctccaaagccaaagggcagccccgagaaccacaggtgtacgtgctgcccccatcccgggaggagatgaccaagaaccaggtcagcctgctgtgcctggtcaaaggcttctatcccagcgacatcgccgtggagtgggagagcaatgggcagccggagaacaactacctcacctggcctcccgtgctggactccgacggctccttcttcctctacagcaagctcaccgtggacaagtctagatggcagcaggggaacgtcttctcatgctccgtgatgcatgaggctctgcacaaccactacacgcagaagagcctctccctgtctccgggt

SEQ ID NO: 370 - DNA, 1365 bp, Artificial Sequence
  Description of Artificial Sequence: Synthetic polynucleotide
caggttcagctgcaagagtctggccctggcctggtcaagccttccgagacactgtctctgacctgcaccgtgtctggcggctccatctcctcctactactggtcctggatcagacagcctcctggcaaaggcctggaatggatcggctacatctactactccggctccaccaactacaaccccagcctgaagtccagagtgaccatctccgtggacacctccaagaaccagttctccctgaagctgtcctccgtgaccgctgctgataccgccgtgtactattgtgctggcaccaccatcttcggcgtggtcacccctaacttctactacggcatggacgtgtggggccaaggcacaacagtgacagtctcttctgcctccaccaagggtccatcggtcttccccctggcaccctcctccaagagcacctctgggggcacagcggccctgggctgcctggtcaaggactacttccccgaaccggtgacggtgtcgtggaactcaggcgccctgaccagcggcgtgcacaccttcccggctgtcctacagtcctcaggactctactccctcagcagcgtggtgaccgtgccctccagcagcttgggcacccagacctacatctgcaacgtgaatcacaagcccagcaacaccaaggtggacaagaaagttgagcccaaatcttgtgacaaaactcacacttgtccaccgtgcccagcacctgaagcagcagggggaccgtcagtcttcctcttccccccaaaacccaaggacaccctcatgatctcccggacccctgaggtcacatgcgtggtggtgagcgtgagccacgaagaccctgaggtcaagttcaactggtacgtggacggcgtggaggtgcataatgccaagacaaagccgcgggaggagcagtacaacagcacgtaccgtgtggtcagcgtcctcaccgtcctgcaccaggactggctgaatggcaaggagtacaagtgcaaggtgtccaacaaagccctcccagcccccatcgagaaaaccatctccaaagccaaagggcagccccgagaaccacaggtgtacgtgctgcccccatcccgggaggagatgaccaagaaccaggtcagcctgctgtgcctggtcaaaggcttctatcccagcgacatcgccgtggagtgggagagcaatgggcagccggagaacaactacctcacctggcctcccgtgctggactccgacggctccttcttcctctacagcaagctcaccgtggacaagtccagatggcagcaggggaacgtcttctcatgctccgtgatgcatgaggctctgcacaaccactacacgcagaagtctctctccctgtctccgggaaaa

SEQ ID NO: 371 - DNA, 1335 bp, Artificial Sequence
  Description of Artificial Sequence: Synthetic polynucleotide
gaggtgcaactggtggagtctgggggaggcctggtcaagcctggggggtccctgagactctcctgtgcagcctctggattcaccttcagtagatataacatgaactgggtccgccaggctccagggaaggggctggagtgggtctcatccattagtactagtagtaattacatatactacgcagactcagtgaagggccgattcaccttctccagagacaacgccaagaactcactggatctgcaaatgagcggcctgagagccgaggacacggctatttattactgtacgagaggctgggggccttttgactactggggccagggaaccctggtcaccgtctcctcagcctccaccaagggcccatcggtcttccccctggcaccctcctccaagagcacctctgggggcacagcggccctgggctgcctggtcaaggactacttccccgaaccggtgacggtgtcgtggaactcaggcgccctgaccagcggcgtgcacaccttcccggctgtcctacagtcctcaggactctactccctcagcagcgtggtgaccgtgccctccagcagcttgggcacccagacctacatctgcaacgtgaatcacaagcccagcaacaccaaggtggacaagaaagttgagcccaaatcttgtgacaaaactcacacatgtccaccgtgcccagcacctgaagcagcagggggaccgtcagtcttcctcttccccccaaaacccaaggacaccctcatgatctcccggacccctgaggtcacatgcgtggtggtgagcgtgagccacgaagaccctgaggtcaagttcaactggtacgtggacggcgtggaggtgcataatgccaagacaaagccgcgggaggagcagtacaacagcacgtaccgtgtggtcagcgtcctcaccgtcctgcaccaggactggctgaatggcaaggagtacaagtgcaaggtctccaacaaagccctcccagcccccatcgagaaaaccatctccaaagccaaagggcagccccgagaaccacaggtgtacgtgtaccccccatcccgggaggagatgaccaagaaccaggtcagcctgacctgcctggtcaaaggcttctatcccagcgacatcgccgtggagtgggagagcaatgggcagccggagaacaactacaagaccacgcctcccgtgctggactccgacggctccttcgccctcgtgagcaagctcaccgtggacaagtctagatggcagcaggggaacgtcttctcatgctccgtgatgcatgaggctctgcacaaccactacacgcagaagagcctctccctgtctccgggt

SEQ ID NO: 372 - DNA, 1347 bp, Artificial Sequence
  Description of Artificial Sequence: Synthetic polynucleotide
caggtgcagctccaacagagtggtcccagactcgtgagaccctctcaaacactcagtttgacttgtgccatctcaggcgattcagttttcaacaacaatgcagcttggagctggattaggcagtcacctagtcgcggtcttgaatggcttgggcgtacatactatcgctctaaatggttgtatgattacgctgtgtccgtgaagagccgaatcaccgtaaaccctgatacctccaggaatcagttcacattgcaactgaatagtgtgactcccgaggatactgcactctattattgtgcccgaggatatagcagtagcttcgactattggggacaagggacactcgttaccgttagttcagcctccaccaagggcccatcggtcttccccctggcaccctcctccaagagcacctctgggggcacagcggccctgggctgcctggtcaaggactacttccccgaaccggtgacggtgtcgtggaactcaggcgccctgaccagcggcgtgcacaccttcccggctgtcctacagtcctcaggactctactccctcagcagcgtggtgaccgtgccctccagcagcttgggcacccagacctacatctgcaacgtgaatcacaagcccagcaacaccaaggtggacaagaaagttgagcccaaatcttgtgacaaaactcacacatgtccaccgtgcccagcacctgaagcagcagggggaccgtcagtcttcctcttccccccaaaacccaaggacaccctcatgatctcccggacccctgaggtcacatgcgtggtggtgagcgtgagccacgaagaccctgaggtcaagttcaactggtacgtggacggcgtggaggtgcataatgccaagacaaagccgcgggaggagcagtacaacagcacgtaccgtgtggtcagcgtcctcaccgtcctgcaccaggactggctgaatggcaaggagtacaagtgcaaggtctccaacaaagccctcccagcccccatcgagaaaaccatctccaaagccaaagggcagccccgagaaccacaggtgtacgtgtaccccccatcccgggaggagatgaccaagaaccaggtcagcctgacctgcctggtcaaaggcttctatcccagcgacatcgccgtggagtgggagagcaatgggcagccggagaacaactacaagaccacgcctcccgtgctggactccgacggctccttcgccctcgtgagcaagctcaccgtggacaagtctagatggcagcaggggaacgtcttctcatgctccgtgatgcatgaggctctgcacaaccactacacgcagaagagcctctccctgtctccgggt

SEQ ID NO: 373 - DNA, 1422 bp, Artificial Sequence
  Description of Artificial Sequence: Synthetic polynucleotide
gacatacaaatgacacaatcaccctcttctctttctgcaagcgttggcgaccgtgtcactatcacttgtcgagcccgccagtccataggtactgccattcactggtatcaacagaagcctggcaaggctcccaaactcctgattaagtatgccagcgagagcatttccggcgtaccttcaagattttccggctccggtagtgggacagatttcactctcactatatctagcctccaaccagaagatttcgccacttactactgtcaacaatcaggttcatggccttacactttcggccaggggacaaaattggagatcaagggcggctccgagggcaagagcagcggcagcggcagcgagagcaagagcaccggcggcagcgaggtgcaactggtggagtctgggggaggcctggtcaagcctggggggtccctgagactctcctgtgcagcctctggattcaccttcagtagatataacatgaactgggtccgccaggctccagggaaggggctggagtgggtctcatccattagtactagtagtaattacatatactacgcagactcagtgaagggccgattcaccttctccagagacaacgccaagaactcactggatctgcaaatgagcggcctgagagccgaggacacggctatttattactgtacgagaggctgggggccttttgactactggggccagggaaccctggtcaccgtctcctcagagcccaaatctagcgacaaaactcacacatgtccaccgtgcccagcacctgaagcagcagggggaccgtcagtcttcctcttccccccaaaacccaaggacaccctcatgatctcccggacccctgaggtcacatgcgtggtggtgagcgtgagccacgaagaccctgaggtcaagttcaactggtacgtggacggcgtggaggtgcataatgccaagacaaagccgcgggaggagcagtacaacagcacgtaccgtgtggtcagcgtcctcaccgtcctgcaccaggactggctgaatggcaaggagtacaagtgcaaggtctccaacaaagccctcccagcccccatcgagaaaaccatctccaaagccaaagggcagccccgagaaccacaggtgtacgtgtaccccccatcccgggaggagatgaccaagaaccaggtcagcctgacctgcctggtcaaaggcttctatcccagcgacatcgccgtggagtgggagagcaatgggcagccggagaacaactacaagaccacgcctcccgtgctggactccgacggctccttcgccctcgtgagcaagctcaccgtggacaagtctagatggcagcaggggaacgtcttctcatgctccgtgatgcatgaggctctgcacaaccactacacgcagaagagcctctccctgtctccgggt

SEQ ID NO: 374 - DNA, 1425 bp, Artificial Sequence
  Description of Artificial Sequence: Synthetic polynucleotide
gacatccagatgacccagtctccatcctctctgtccgcctctgtgggcgacagagtgaccattacctgccgggccagacagtctatcggcaccgctatccactggtatcagcagaagcctggcaaggcccctaagctgctgattaagtacgcctccgagtccatctccggcgtgccctccagattttctggctctggatctggcaccgactttaccctgacaatctccagcctgcagcctgaggacttcgccacctactactgtcagcagtccggctcttggccttacacctttggtcagggcaccaagctggaaatcaagggcggatctgagggaaagtccagcggctccggcagcgaaagcaagtccaccggcggaagcgaggtgcagctggttgaatctggcggaggactggttaagcctggcggctctctgagactgtcttgtgctgcttctggcttcaccttcagccggtacaacatgaactgggtccgacaggctcctggcaaaggcctggaatgggtgtcctccatctccacctccagcaactacatctactacgccgactccgtgaagggcagattcaccttctccagagacaacgccaagaactccctggacctgcagatgtctggcctgagagctgaggacaccgctatctactactgcaccagaggctggggacccttcgattattggggccagggaaccctggtcaccgtgtcatctgagcccaaatctagcgacaaaactcacacttgtccaccgtgcccagcacctgaagcagcagggggaccgtcagtcttcctcttccccccaaaacccaaggacaccctcatgatctcccggacccctgaggtcacatgcgtggtggtgagcgtgagccacgaagaccctgaggtcaagttcaactggtacgtggacggcgtggaggtgcataatgccaagacaaagccgcgggaggagcagtacaacagcacgtaccgtgtggtcagcgtcctcaccgtcctgcaccaggactggctgaatggcaaggagtacaagtgcaaggtgtccaacaaagccctcccagcccccatcgagaaaaccatctccaaagccaaagggcagccccgagaaccacaggtgtacgtgtaccccccatcccgggaggagatgaccaagaaccaggtcagcctgacctgcctggtcaaaggcttctatcccagcgacatcgccgtggagtgggagagcaatgggcagccggagaacaactacaagaccacgcctcccgtgctggactccgacggctccttcgccctcgtgagcaagctcaccgtggacaagtccagatggcagcaggggaacgtcttctcatgctccgtgatgcatgaggctctgcacaaccactacacgcagaagtctctctccctgtctccgggaaaa

SEQ ID NO: 375 - protein, 475 aa, Artificial Sequence
  Description of Artificial Sequence: Synthetic polypeptide
EVQLVESGGGLVKPGGSLRLSCAASGFTFSRYNMNWVRQAPGKGLEWVSSISTSSNYIYYADSVKGRFTFSRDNAKNSLDLQMSGLRAEDTAIYYCTRGWGPFDYWGQGTLVTVSSGGSEGKSSGSGSESKSTGGSDIQMTQSPSSLSASVGDRVTITCRARQSIGTAIHWYQQKPGKAPKLLIKYASESISGVPSRFSGSGSGTDFTLTISSLQPEDFATYYCQQSGSWPYTFGQGTKLEIKEPKSSDKTHTCPPCPAPEAAGGPSVFLFPPKPKDTLMISRTPEVTCVVVSVSHEDPEVKFNWYVDGVEVHNAKTKPREEQYNSTYRVVSVLTVLHQDWLNGKEYKCKVSNKALPAPIEKTISKAKGQPREPQVYVYPPSREEMTKNQVSLTCLVKGFYPSDIAVEWESNGQPENNYKTTPPVLDSDGSFALVSKLTVDKSRWQQGNVFSCSVMHEALHNHYTQKSLSLSPGK

SEQ ID NO: 376 - protein, 475 aa, Artificial Sequence; identical to SEQ ID NO: 362
  Description of Artificial Sequence: Synthetic polypeptide

SEQ ID NO: 377 - protein, 475 aa, Artificial Sequence
  Description of Artificial Sequence: Synthetic polypeptide
EVQLVESGGGLVKPGGSLRLSCAASGFTFSRYNMNWVRQAPGKGLEWVSSISTSSNYIYYADSVKGRFTFSRDNAKNSLDLQMSGLRAEDTAIYYCTRGWGPFDYWGQGTLVTVSSGGSEGKSSGSGSESKSTGGSDIQMTQSPSSLSASVGDRVTITCRARQSIGTAIHWYQQKPGKAPKLLIKYASESISGVPSRFSGSGSGTDFTLTISSVQPEDFATYYCQQSGSWPYTFGQGTKLEIKEPKSSDKTHTCPPCPAPEAAGGPSVFLFPPKPKDTLMISRTPEVTCVVVSVSHEDPEVKFNWYVDGVEVHNAKTKPREEQYNSTYRVVSVLTVLHQDWLNGKEYKCKVSNKALPAPIEKTISKAKGQPREPQVYVYPPSREEMTKNQVSLTCLVKGFYPSDIAVEWESNGQPENNYKTTPPVLDSDGSFALVSKLTVDKSRWQQGNVFSCSVMHEALHNHYTQKSLSLSPGK

SEQ ID NO: 378 - protein, 330 aa, Artificial Sequence
  Description of Artificial Sequence: Synthetic polypeptide
ASTKGPSVFPLAPSSKSTSGGTAALGCLVKDYFPEPVTVSWNSGALTSGVHTFPAVLQSSGLYSLSSVVTVPSSSLGTQTYICNVNHKPSNTKVDKKVEPKSCDKTHTCPPCPAPEAAGGPSVFLFPPKPKDTLMISRTPEVTCVVVSVSHEDPEVKFNWYVDGVEVHNAKTKPREEQYNSTYRVVSVLTVLHQDWLNGKEYKCKVSNKALPAPIEKTISKAKGQPREPQVYVLPPSREEMTKNQVSLLCLVKGFYPSDIAVEWESNGQPENNYLTWPPVLDSDGSFFLYSKLTVDKSRWQQGNVFSCSVMHEALHNHYTQKSLSLSPGK

SEQ ID NO: 379 - protein, 475 aa, Artificial Sequence
  Description of Artificial Sequence: Synthetic polypeptide
EVQLVESGGGLVKPGGSLRLSCAASGFTFSRYNMNWVRQAPGKGLEWVSSISTSSNYIYYADSVKGRFTFSRDNAKNSLDLQMSGLRAEDTAIYYCTRGWGPFDYWGQGTLVTVSSGGSEGKSSGSGSESKSTGGSDIQMTQSPSSLSASVGDRVTITCRARQSIGTAIHWYQQKPGKAPKLLIYYASESISGVPSRFSGSGSGTDFTLTISSLQPEDFATYYCQQSGSWPYTFGQGTKLEIKEPKSSDKTHTCPPCPAPEAAGGPSVFLFPPKPKDTLMISRTPEVTCVVVSVSHEDPEVKFNWYVDGVEVHNAKTKPREEQYNSTYRVVSVLTVLHQDWLNGKEYKCKVSNKALPAPIEKTISKAKGQPREPQVYVYPPSREEMTKNQVSLTCLVKGFYPSDIAVEWESNGQPENNYKTTPPVLDSDGSFALVSKLTVDKSRWQQGNVFSCSVMHEALHNHYTQKSLSLSPGK

SEQ ID NO: 380 - protein, 475 aa, Artificial Sequence
  Description of Artificial Sequence: Synthetic polypeptide
DIQMTQSPSSLSASVGDRVTITCRARQSIGTAIHWYQQKPGKAPKLLIYYASESISGVPSRFSGSGSGTDFTLTISSLQPEDFATYYCQQSGSWPYTFGQGTKLEIKGGSEGKSSGSGSESKSTGGSEVQLVESGGGLVKPGGSLRLSCAASGFTFSRYNMNWVRQAPGKGLEWVSSISTSSNYIYYADSVKGRFTFSRDNAKNSLDLQMSGLRAEDTAIYYCTRGWGPFDYWGQGTLVTVSSEPKSSDKTHTCPPCPAPEAAGGPSVFLFPPKPKDTLMISRTPEVTCVVVSVSHEDPEVKFNWYVDGVEVHNAKTKPREEQYNSTYRVVSVLTVLHQDWLNGKEYKCKVSNKALPAPIEKTISKAKGQPREPQVYVYPPSREEMTKNQVSLTCLVKGFYPSDIAVEWESNGQPENNYKTTPPVLDSDGSFALVSKLTVDKSRWQQGNVFSCSVMHEALHNHYTQKSLSLSPGK

SEQ ID NO: 381 - protein, 475 aa, Artificial Sequence
  Description of Artificial Sequence: Synthetic polypeptide
EVQLVESGGGLVKPGGSLRLSCAASGFTFSRYNMNWVRQAPGKGLEWVSSISTSSNYIYYADSVKGRFTFSRDNAKNSLDLQMSGLRAEDTAIYYCTRGWGPFDYWGQGTLVTVSSGGSEGKSSGSGSESKSTGGSDILLTQSPGILSVSPGERVSFSCRARQSIGTAIHWYQQRTNGSPRLLIKYASESISGIPSRFSGSGSGTDFTLTINSVESEDIADYYCQQSGSWPYTFGGGTKLEIKEPKSSDKTHTCPPCPAPEAAGGPSVFLFPPKPKDTLMISRTPEVTCVVVSVSHEDPEVKFNWYVDGVEVHNAKTKPREEQYNSTYRVVSVLTVLHQDWLNGKEYKCKVSNKALPAPIEKTISKAKGQPREPQVYVYPPSREEMTKNQVSLTCLVKGFYPSDIAVEWESNGQPENNYKTTPPVLDSDGSFALVSKLTVDKSRWQQGNVFSCSVMHEALHNHYTQKSLSLSPGK

SEQ ID NO: 382 - protein, 475 aa, Artificial Sequence
  Description of Artificial Sequence: Synthetic polypeptide
DILLTQSPGILSVSPGERVSFSCRARQSIGTAIHWYQQRTNGSPRLLIKYASESISGIPSRFSGSGSGTDFTLTINSVESEDIADYYCQQSGSWPYTFGGGTKLEIKGGSEGKSSGSGSESKSTGGSEVQLVESGGGLVKPGGSLRLSCAASGFTFSRYNMNWVRQAPGKGLEWVSSISTSSNYIYYADSVKGRFTFSRDNAKNSLDLQMSGLRAEDTAIYYCTRGWGPFDYWGQGTLVTVSSEPKSSDKTHTCPPCPAPEAAGGPSVFLFPPKPKDTLMISRTPEVTCVVVSVSHEDPEVKFNWYVDGVEVHNAKTKPREEQYNSTYRVVSVLTVLHQDWLNGKEYKCKVSNKALPAPIEKTISKAKGQPREPQVYVYPPSREEMTKNQVSLTCLVKGFYPSDIAVEWESNGQPENNYKTTPPVLDSDGSFALVSKLTVDKSRWQQGNVFSCSVMHEALHNHYTQKSLSLSPGK

SEQ ID NO: 383 - skipped

SEQ ID NO: 384 - DNA, 729 bp, Artificial Sequence
  Description of Artificial Sequence: Synthetic polynucleotide
gaggtgcagctggtggagagcggtggcggtctggtgaagccaggtggcagcctgcgcctgagctgtgccgccagcggtttcaccttcagccgctacaacatgaactgggtgcgccaagccccaggcaagggcctggagtgggtgagcagcatcagcaccagcagcaactacatctactacgccgacagcgtgaagggccgcttcaccttcagccgcgacaacgccaagaacagcctggacctgcagatgagcggtctgcgcgccgaggacaccgccatctactactgcacccgcggttggggcccattcgactactggggccagggcaccctggtgaccgtgagcagcggcggatctgagggaaagtccagcggctccggcagcgaaagcaagtccaccggcggaagcgacatccagatgacccagagcccaagcagcctgagcgccagcgtcggcgaccgcgtgaccatcacctgtcgtgcccgccagagcatcggcaccgccatccactggtaccagcagaagccaggcaaggccccaaagctgctgatctactacgccagcgagagcatcagcggtgtgccaagccgcttcagcggcagcggcagcggcaccgacttcaccctgaccatcagcagcgtgcagccagaggacttcgccacctactactgccagcagagcggcagctggccatacaccttcggccagggcaccaagctggagatcaag

SEQ ID NO: 385 - DNA, 729 bp, Artificial Sequence
  Description of Artificial Sequence: Synthetic polynucleotide
gacatccagatgacccagagcccaagcagcctgagcgccagcgtcggcgaccgcgtgaccatcacctgtcgtgcccgccagagcatcggcaccgccatccactggtaccagcagaagccaggcaaggccccaaagctgctgatctactacgccagcgagagcatcagcggtgtgccaagccgcttcagcggcagcggcagcggcaccgacttcaccctgaccatcagcagcgtgcagccagaggacttcgccacctactactgccagcagagcggcagctggccatacaccttcggccagggcaccaagctggagatcaagggcggatctgagggaaagtccagcggctccggcagcgaaagcaagtccaccggcggaagcgaggtgcagctggtggagagcggtggcggtctggtgaagccaggtggcagcctgcgcctgagctgtgccgccagcggtttcaccttcagccgctacaacatgaactgggtgcgccaagccccaggcaagggcctggagtgggtgagcagcatcagcaccagcagcaactacatctactacgccgacagcgtgaagggccgcttcaccttcagccgcgacaacgccaagaacagcctggacctgcagatgagcggtctgcgcgccgaggacaccgccatctactactgcacccgcggttggggcccattcgactactggggccagggcaccctggtgaccgtgagcagc

SEQ ID NO: 386 - DNA, 729 bp, Artificial Sequence
  Description of Artificial Sequence: Synthetic polynucleotide
gaggtgcagctggtggagagcggtggcggtctggtgaagccaggtggcagcctgcgcctgagctgtgccgccagcggtttcaccttcagccgctacaacatgaactgggtgcgccaagccccaggcaagggcctggagtgggtgagcagcatcagcaccagcagcaactacatctactacgccgacagcgtgaagggccgcttcaccttcagccgcgacaacgccaagaacagcctggacctgcagatgagcggtctgcgcgccgaggacaccgccatctactactgcacccgcggttggggcccattcgactactggggccagggcaccctggtgaccgtgagcagcggcggatctgagggaaagtccagcggctccggcagcgaaagcaagtccaccggcggaagcgacatccagatgacccagagcccaagcagcctgagcgccagcgtcggcgaccgcgtgaccatcacctgtcgtgcccgccagagcatcggcaccgccatccactggtaccagcagaagccaggcaaggccccaaagctgctgatcaagtacgccagcgagagcatcagcggtgtgccaagccgcttcagcggcagcggcagcggcaccgacttcaccctgaccatcagcagcctgcagccagaggacttcgccacctactactgccagcagagcggcagctggccatacaccttcggccagggcaccaagctggagatcaag

SEQ ID NO: 387 - DNA, 729 bp, Artificial Sequence
  Description of Artificial Sequence: Synthetic polynucleotide
gacatccagatgacccagagcccaagcagcctgagcgccagcgtcggcgaccgcgtgaccatcacctgtcgtgcccgccagagcatcggcaccgccatccactggtaccagcagaagccaggcaaggccccaaagctgctgatcaagtacgccagcgagagcatcagcggtgtgccaagccgcttcagcggcagcggcagcggcaccgacttcaccctgaccatcagcagcctgcagccagaggacttcgccacctactactgccagcagagcggcagctggccatacaccttcggccagggcaccaagctggagatcaagggcggatctgagggaaagtccagcggctccggcagcgaaagcaagtccaccggcggaagcgaggtgcagctggtggagagcggtggcggtctggtgaagccaggtggcagcctgcgcctgagctgtgccgccagcggtttcaccttcagccgctacaacatgaactgggtgcgccaagccccaggcaagggcctggagtgggtgagcagcatcagcaccagcagcaactacatctactacgccgacagcgtgaagggccgcttcaccttcagccgcgacaacgccaagaacagcctggacctgcagatgagcggtctgcgcgccgaggacaccgccatctactactgcacccgcggttggggcccattcgactactggggccagggcaccctggtgaccgtgagcagc

SEQ ID NO: 388 - DNA, 729 bp, Artificial Sequence
  Description of Artificial Sequence: Synthetic polynucleotide
gaggtgcagctggtggagagcggtggcggtctggtgaagccaggtggcagcctgcgcctgagctgtgccgccagcggtttcaccttcagccgctacaacatgaactgggtgcgccaagccccaggcaagggcctggagtgggtgagcagcatcagcaccagcagcaactacatctactacgccgacagcgtgaagggccgcttcaccttcagccgcgacaacgccaagaacagcctggacctgcagatgagcggtctgcgcgccgaggacaccgccatctactactgcacccgcggttggggcccattcgactactggggccagggcaccctggtgaccgtgagcagcggcggatctgagggaaagtccagcggctccggcagcgaaagcaagtccaccggcggaagcgacatccagatgacccagagcccaagcagcctgagcgccagcgtcggcgaccgcgtgaccatcacctgtcgtgcccgccagagcatcggcaccgccatccactggtaccagcagaagccaggcaaggccccaaagctgctgatcaagtacgccagcgagagcatcagcggtgtgccaagccgcttcagcggcagcggcagcggcaccgacttcaccctgaccatcagcagcgtgcagccagaggacttcgccacctactactgccagcagagcggcagctggccatacaccttcggccagggcaccaagctggagatcaag

SEQ ID NO: 389 - DNA, 729 bp, Artificial Sequence
  Description of Artificial Sequence: Synthetic polynucleotide
gacatccagatgacccagagcccaagcagcctgagcgccagcgtcggcgaccgcgtgaccatcacctgtcgtgcccgccagagcatcggcaccgccatccactggtaccagcagaagccaggcaaggccccaaagctgctgatcaagtacgccagcgagagcatcagcggtgtgccaagccgcttcagcggcagcggcagcggcaccgacttcaccctgaccatcagcagcgtgcagccagaggacttcgccacctactactgccagcagagcggcagctggccatacaccttcggccagggcaccaagctggagatcaagggcggatctgagggaaagtccagcggctccggcagcgaaagcaagtccaccggcggaagcgaggtgcagctggtggagagcggtggcggtctggtgaagccaggtggcagcctgcgcctgagctgtgccgccagcggtttcaccttcagccgctacaacatgaactgggtgcgccaagccccaggcaagggcctggagtgggtgagcagcatcagcaccagcagcaactacatctactacgccgacagcgtgaagggccgcttcaccttcagccgcgacaacgccaagaacagcctggacctgcagatgagcggtctgcgcgccgaggacaccgccatctactactgcacccgcggttggggcccattcgactactggggccagggcaccctggtgaccgtgagcagc

SEQ ID NO: 390 - DNA, 729 bp, Artificial Sequence
  Description of Artificial Sequence: Synthetic polynucleotide
gaggtgcagctggtggagagcggtggcggtctggtgaagccaggtggcagcctgcgcctgagctgtgccgccagcggtttcaccttcagccgctacaacatgaactgggtgcgccaagccccaggcaagggcctggagtgggtgagcagcatcagcaccagcagcaactacatctactacgccgacagcgtgaagggccgcttcaccttcagccgcgacaacgccaagaacagcctggacctgcagatgagcggtctgcgcgccgaggacaccgccatctactactgcacccgcggttggggcccattcgactactggggccagggcaccctggtgaccgtgagcagcggcggatctgagggaaagtccagcggctccggcagcgaaagcaagtccaccggcggaagcgacatccagatgacccagagcccaagcagcctgagcgccagcgtcggcgaccgcgtgaccatcacctgtcgtgcccgccagagcatcggcaccgccatccactggtaccagcagaagccaggcaaggccccaaagctgctgatctactacgccagcgagagcatcagcggtgtgccaagccgcttcagcggcagcggcagcggcaccgacttcaccctgaccatcagcagcctgcagccagaggacttcgccacctactactgccagcagagcggcagctggccatacaccttcggccagggcaccaagctggagatcaag

SEQ ID NO: 391 - DNA, 729 bp, Artificial Sequence
  Description of Artificial Sequence: Synthetic polynucleotide
gacatccagatgacccagagcccaagcagcctgagcgccagcgtcggcgaccgcgtgaccatcacctgtcgtgcccgccagagcatcggcaccgccatccactggtaccagcagaagccaggcaaggccccaaagctgctgatctactacgccagcgagagcatcagcggtgtgccaagccgcttcagcggcagcggcagcggcaccgacttcaccctgaccatcagcagcctgcagccagaggacttcgccacctactactgccagcagagcggcagctggccatacaccttcggccagggcaccaagctggagatcaagggcggatctgagggaaagtccagcggctccggcagcgaaagcaagtccaccggcggaagcgaggtgcagctggtggagagcggtggcggtctggtgaagccaggtggcagcctgcgcctgagctgtgccgccagcggtttcaccttcagccgctacaacatgaactgggtgcgccaagccccaggcaagggcctggagtgggtgagcagcatcagcaccagcagcaactacatctactacgccgacagcgtgaagggccgcttcaccttcagccgcgacaacgccaagaacagcctggacctgcagatgagcggtctgcgcgccgaggacaccgccatctactactgcacccgcggttggggcccattcgactactggggccagggcaccctggtgaccgtgagcagc

SEQ ID NO: 392 - DNA, 729 bp, Artificial Sequence
  Description of Artificial Sequence: Synthetic polynucleotide
gaggtgcaactggtggagtctgggggaggcctggtcaagcctggggggtccctgagactctcctgtgcagcctctggattcaccttcagtagatataacatgaactgggtccgccaggctccagggaaggggctggagtgggtctcatccattagtactagtagtaattacatatactacgcagactcagtgaagggccgattcaccttctccagagacaacgccaagaactcactggatctgcaaatgagcggcctgagagccgaggacacggctatttattactgtacgagaggctgggggccttttgactactggggccagggaaccctggtcaccgtctcctcaggcggatctgagggaaagtccagcggctccggcagcgaaagcaagtccaccggcggaagcgacatcttgctgactcagtctccaggcatcctgtctgtgagtccaggagaaagagtcagtttctcctgcagggccagacagagcattggcacagccatacactggtatcagcaaagaacaaatggttctccaaggcttctcataaagtatgcttctgagtctatctctgggatcccttccaggtttagcggcagtggatcagggacagattttactcttaccatcaacagtgtggagtctgaagatattgcagattattactgtcaacaaagtgggagctggccgtacacgttcggaggggggaccaagctggaaataaaa

SEQ ID NO: 393 - DNA, 729 bp, Artificial Sequence
  Description of Artificial Sequence: Synthetic polynucleotide
gacatcttgctgactcagtctccaggcatcctgtctgtgagtccaggagaaagagtcagtttctcctgcagggccagacagagcattggcacagccatacactggtatcagcaaagaacaaatggttctccaaggcttctcataaagtatgcttctgagtctatctctgggatcccttccaggtttagcggcagtggatcagggacagattttactcttaccatcaacagtgtggagtctgaagatattgcagattattactgtcaacaaagtgggagctggccgtacacgttcggaggggggaccaagctggaaataaaaggcggatctgagggaaagtccagcggctccggcagcgaaagcaagtccaccggcggaagcgaggtgcaactggtggagtctgggggaggcctggtcaagcctggggggtccctgagactctcctgtgcagcctctggattcaccttcagtagatataacatgaactgggtccgccaggctccagggaaggggctggagtgggtctcatccattagtactagtagtaattacatatactacgcagactcagtgaagggccgattcaccttctccagagacaacgccaagaactcactggatctgcaaatgagcggcctgagagccgaggacacggctatttattactgtacgagaggctgggggccttttgactactggggccagggaaccctggtcaccgtctcctca

SEQ ID NO: 394 - DNA, 1425 bp, Artificial Sequence
  Description of Artificial Sequence: Synthetic polynucleotide
gaggtgcagctggtggagagcggtggcggtctggtgaagccaggtggcagcctgcgcctgagctgtgccgccagcggtttcaccttcagccgctacaacatgaactgggtgcgccaagccccaggcaagggcctggagtgggtgagcagcatcagcaccagcagcaactacatctactacgccgacagcgtgaagggccgcttcaccttcagccgcgacaacgccaagaacagcctggacctgcagatgagcggtctgcgcgccgaggacaccgccatctactactgcacccgcggttggggcccattcgactactggggccagggcaccctggtgaccgtgagcagcggcggatctgagggaaagtccagcggctccggcagcgaaagcaagtccaccggcggaagcgacatccagatgacccagagcccaagcagcctgagcgccagcgtcggcgaccgcgtgaccatcacctgtcgtgcccgccagagcatcggcaccgccatccactggtaccagcagaagccaggcaaggccccaaagctgctgatctactacgccagcgagagcatcagcggtgtgccaagccgcttcagcggcagcggcagcggcaccgacttcaccctgaccatcagcagcgtgcagccagaggacttcgccacctactactgccagcagagcggcagctggccatacaccttcggccagggcaccaagctggagatcaaggagcccaaatctagcgacaaaactcacacatgtccaccgtgcccagcacctgaagcagcagggggaccgtcagtcttcctcttccccccaaaacccaaggacaccctcatgatctcccggacccctgaggtcacatgcgtggtggtgagcgtgagccacgaagaccctgaggtcaagttcaactggtacgtggacggcgtggaggtgcataatgccaagacaaagccgcgggaggagcagtacaacagcacgtaccgtgtggtcagcgtcctcaccgtcctgcaccaggactggctgaatggcaaggagtacaagtgcaaggtctccaacaaagccctcccagcccccatcgagaaaaccatctccaaagccaaagggcagccccgagaaccacaggtgtacgtgtaccccccatcccgggaggagatgaccaagaaccaggtcagcctgacctgcctggtcaaaggcttctatcccagcgacatcgccgtggagtgggagagcaatgggcagccggagaacaactacaagaccacgcctcccgtgctggactccgacggctccttcgccctcgtgagcaagctcaccgtggacaagtctagatggcagcaggggaacgtcttctcatgctccgtgatgcatgaggctctgcacaaccactacacgcagaagagcctctccctgtctccgggtaaa

SEQ ID NO: 395 - DNA, 1425 bp, Artificial Sequence
  Description of Artificial Sequence: Synthetic polynucleotide
gacatccagatgacccagagcccaagcagcctgagcgccagcgtcggcgaccgcgtgaccatcacctgtcgtgcccgccagagcatcggcaccgccatccactggtaccagcagaagccaggcaaggccccaaagctgctgatctactacgccagcgagagcatcagcggtgtgccaagccgcttcagcggcagcggcagcggcaccgacttcaccctgaccatcagcagcgtgcagccagaggacttcgccacctactactgccagcagagcggcagctggccatacaccttcggccagggcaccaagctggagatcaagggcggatctgagggaaagtccagcggctccggcagcgaaagcaagtccaccggcggaagcgaggtgcagctggtggagagcggtggcggtctggtgaagccaggtggcagcctgcgcctgagctgtgccgccagcggtttcaccttcagccgctacaacatgaactgggtgcgccaagccccaggcaagggcctggagtgggtgagcagcatcagcaccagcagcaactacatctactacgccgacagcgtgaagggccgcttcaccttcagccgcgacaacgccaagaacagcctggacctgcagatgagcggtctgcgcgccgaggacaccgccatctactactgcacccgcggttggggcccattcgactactggggccagggcaccctggtgaccgtgagcagcgagcccaaatctagcgacaaaactcacacatgtccaccgtgcccagcacctgaagcagcagggggaccgtcagtcttcctcttccccccaaaacccaaggacaccctcatgatctcccggacccctgaggtcacatgcgtggtggtgagcgtgagccacgaagaccctgaggtcaagttcaactggtacgtggacggcgtggaggtgcataatgccaagacaaagccgcgggaggagcagtacaacagcacgtaccgtgtggtcagcgtcctcaccgtcctgcaccaggactggctgaatggcaaggagtacaagtgcaaggtctccaacaaagccctcccagcccccatcgagaaaaccatctccaaagccaaagggcagccccgagaaccacaggtgtacgtgtaccccccatcccgggaggagatgaccaagaaccaggtcagcctgacctgcctggtcaaaggcttctatcccagcgacatcgccgtggagtgggagagcaatgggcagccggagaacaactacaagaccacgcctcccgtgctggactccgacggctccttcgccctcgtgagcaagctcaccgtggacaagtctagatggcagcaggggaacgtcttctcatgctccgtgatgcatgaggctctgcacaaccactacacgcagaagagcctctccctgtctccgggtaaa

SEQ ID NO: 396 - DNA, 1425 bp, Artificial Sequence
  Description of Artificial Sequence: Synthetic polynucleotide
gaggtgcagctggtggagagcggtggcggtctggtgaagccaggtggcagcctgcgcctgagctgtgccgccagcggtttcaccttcagccgctacaacatgaactgggtgcgccaagccccaggcaagggcctggagtgggtgagcagcatcagcaccagcagcaactacatctactacgccgacagcgtgaagggccgcttcaccttcagccgcgacaacgccaagaacagcctggacctgcagatgagcggtctgcgcgccgaggacaccgccatctactactgcacccgcggttggggcccattcgactactggggccagggcaccctggtgaccgtgagcagcggcggatctgagggaaagtccagcggctccggcagcgaaagcaagtccaccggcggaagcgacatccagatgacccagagcccaagcagcctgagcgccagcgtcggcgaccgcgtgaccatcacctgtcgtgcccgccagagcatcggcaccgccatccactggtaccagcagaagccaggcaaggccccaaagctgctgatcaagtacgccagcgagagcatcagcggtgtgccaagccgcttcagcggcagcggcagcggcaccgacttcaccctgaccatcagcagcctgcagccagaggacttcgccacctactactgccagcagagcggcagctggccatacaccttcggccagggcaccaagctggagatcaaggagcccaaatctagcgacaaaactcacacatgtccaccgtgcccagcacctgaagcagcagggggaccgtcagtcttcctcttccccccaaaacccaaggacaccctcatgatctcccggacccctgaggtcacatgcgtggtggtgagcgtgagccacgaagaccctgaggtcaagttcaactggtacgtggacggcgtggaggtgcataatgccaagacaaagccgcgggaggagcagtacaacagcacgtaccgtgtggtcagcgtcctcaccgtcctgcaccaggactggctgaatggcaaggagtacaagtgcaaggtctccaacaaagccctcccagcccccatcgagaaaaccatctccaaagccaaagggcagccccgagaaccacaggtgtacgtgtaccccccatcccgggaggagatgaccaagaaccaggtcagcctgacctgcctggtcaaaggcttctatcccagcgacatcgccgtggagtgggagagcaatgggcagccggagaacaactacaagaccacgcctcccgtgctggactccgacggctccttcgccctcgtgagcaagctcaccgtggacaagtctagatggcagcaggggaacgtcttctcatgctccgtgatgcatgaggctctgcacaaccactacacgcagaagagcctctccctgtctccgggtaaa

SEQ ID NO: 397 - DNA, 1425 bp, Artificial Sequence
  Description of Artificial Sequence: Synthetic polynucleotide
gacatccagatgacccagagcccaagcagcctgagcgccagcgtcggcgaccgcgtgaccatcacctgtcgtgcccgccagagcatcggcaccgccatccactggtaccagcagaagccaggcaaggccccaaagctgctgatcaagtacgccagcgagagcatcagcggtgtgccaagccgcttcagcggcagcggcagcggcaccgacttcaccctgaccatcagcagcctgcagccagaggacttcgccacctactactgccagcagagcggcagctggccatacaccttcggccagggcaccaagctggagatcaagggcggatctgagggaaagtccagcggctccggcagcgaaagcaagtccaccggcggaagcgaggtgcagctggtggagagcggtggcggtctggtgaagccaggtggcagcctgcgcctgagctgtgccgccagcggtttcaccttcagccgctacaacatgaactgggtgcgccaagccccaggcaagggcctggagtgggtgagcagcatcagcaccagcagcaactacatctactacgccgacagcgtgaagggccgcttcaccttcagccgcgacaacgccaagaacagcctggacctgcagatgagcggtctgcgcgccgaggacaccgccatctactactgcacccgcggttggggcccattcgactactggggccagggcaccctggtgaccgtgagcagcgagcccaaatctagcgacaaaactcacacatgtccaccgtgcccagcacctgaagcagcagggggaccgtcagtcttcctcttccccccaaaacccaaggacaccctcatgatctcccggacccctgaggtcacatgcgtggtggtgagcgtgagccacgaagaccctgaggtcaagttcaactggtacgtggacggcgtggaggtgcataatgccaagacaaagccgcgggaggagcagtacaacagcacgtaccgtgtggtcagcgtcctcaccgtcctgcaccaggactggctgaatggcaaggagtacaagtgcaaggtctccaacaaagccctcccagcccccatcgagaaaaccatctccaaagccaaagggcagccccgagaaccacaggtgtacgtgtaccccccatcccgggaggagatgaccaagaaccaggtcagcctgacctgcctggtcaaaggcttctatcccagcgacatcgccgtggagtgggagagcaatgggcagccggagaacaactacaagaccacgcctcccgtgctggactccgacggctccttcgccctcgtgagcaagctcaccgtggacaagtctagatggcagcaggggaacgtcttctcatgctccgtgatgcatgaggctctgcacaaccactacacgcagaagagcctctccctgtctccgggtaaa

SEQ ID NO: 398 - DNA, 1425 bp, Artificial Sequence
  Description of Artificial Sequence: Synthetic polynucleotide
gaggtgcagctggtggagagcggtggcggtctggtgaagccaggtggcagcctgcgcctgagctgtgccgccagcggtttcaccttcagccgctacaacatgaactgggtgcgccaagccccaggcaagggcctggagtgggtgagcagcatcagcaccagcagcaactacatctactacgccgacagcgtgaagggccgcttcaccttcagccgcgacaacgccaagaacagcctggacctgcagatgagcggtctgcgcgccgaggacaccgccatctactactgcacccgcggttggggcccattcgactactggggccagggcaccctggtgaccgtgagcagcggcggatctgagggaaagtccagcggctccggcagcgaaagcaagtccaccggcggaagcgacatccagatgacccagagcccaagcagcctgagcgccagcgtcggcgaccgcgtgaccatcacctgtcgtgcccgccagagcatcggcaccgccatccactggtaccagcagaagccaggcaaggccccaaagctgctgatcaagtacgccagcgagagcatcagcggtgtgccaagccgcttcagcggcagcggcagcggcaccgacttcaccctgaccatcagcagcgtgcagccagaggacttcgccacctactactgccagcagagcggcagctggccatacaccttcggccagggcaccaagctggagatcaaggagcccaaatctagcgacaaaactcacacatgtccaccgtgcccagcacctgaagcagcagggggaccgtcagtcttcctcttccccccaaaacccaaggacaccctcatgatctcccggacccctgaggtcacatgcgtggtggtgagcgtgagccacgaagaccctgaggtcaagttcaactggtacgtggacggcgtggaggtgcataatgccaagacaaagccgcgggaggagcagtacaacagcacgtaccgtgtggtcagcgtcctcaccgtcctgcaccaggactggctgaatggcaaggagtacaagtgcaaggtctccaacaaagccctcccagcccccatcgagaaaaccatctccaaagccaaagggcagccccgagaaccacaggtgtacgtgtaccccccatcccgggaggagatgaccaagaaccaggtcagcctgacctgcctggtcaaaggcttctatcccagcgacatcgccgtggagtgggagagcaatgggcagccggagaacaactacaagaccacgcctcccgtgctggactccgacggctccttcgccctcgtgagcaagctcaccgtggacaagtctagatggcagcaggggaacgtcttctcatgctccgtgatgcatgaggctctgcacaaccactacacgcagaagagcctctccctgtctccgggtaaa

SEQ ID NO: 399 - DNA, 1425 bp, Artificial Sequence
  Description of Artificial Sequence: Synthetic polynucleotide
gacatccagatgacccagagcccaagcagcctgagcgccagcgtcggcgaccgcgtgaccatcacctgtcgtgcccgccagagcatcggcaccgccatccactggtaccagcagaagccaggcaaggccccaaagctgctgatcaagtacgccagcgagagcatcagcggtgtgccaagccgcttcagcggcagcggcagcggcaccgacttcaccctgaccatcagcagcgtgcagccagaggacttcgccacctactactgccagcagagcggcagctggccatacaccttcggccagggcaccaagctggagatcaagggcggatctgagggaaagtccagcggctccggcagcgaaagcaagtccaccggcggaagcgaggtgcagctggtggagagcggtggcggtctggtgaagccaggtggcagcctgcgcctgagctgtgccgccagcggtttcaccttcagccgctacaacatgaactgggtgcgccaagccccaggcaagggcctggagtgggtgagcagcatcagcaccagcagcaactacatctactacgccgacagcgtgaagggccgcttcaccttcagccgcgacaacgccaagaacagcctggacctgcagatgagcggtctgcgcgccgaggacaccgccatctactactgcacccgcggttggggcccattcgactactggggccagggcaccctggtgaccgtgagcagcgagcccaaatctagcgacaaaactcacacatgtccaccgtgcccagcacctgaagcagcagggggaccgtcagtcttcctcttccccccaaaacccaaggacaccctcatgatctcccggacccctgaggtcacatgcgtggtggtgagcgtgagccacgaagaccctgaggtcaagttcaactggtacgtggacggcgtggaggtgcataatgccaagacaaagccgcgggaggagcagtacaacagcacgtaccgtgtggtcagcgtcctcaccgtcctgcaccaggactggctgaatggcaaggagtacaagtgcaaggtctccaacaaagccctcccagcccccatcgagaaaaccatctccaaagccaaagggcagccccgagaaccacaggtgtacgtgtaccccccatcccgggaggagatgaccaagaaccaggtcagcctgacctgcctggtcaaaggcttctatcccagcgacatcgccgtggagtgggagagcaatgggcagccggagaacaactacaagaccacgcctcccgtgctggactccgacggctccttcgccctcgtgagcaagctcaccgtggacaagtctagatggcagcaggggaacgtcttctcatgctccgtgatgcatgaggctctgcacaaccactacacgcagaagagcctctccctgtctccgggtaaa

SEQ ID NO: 400 - DNA, 1425 bp, Artificial Sequence
  Description of Artificial Sequence: Synthetic polynucleotide
gaggtgcagctggtggagagcggtggcggtctggtgaagccaggtggcagcctgcgcctgagctgtgccgccagcggtttcaccttcagccgctacaacatgaactgggtgcgccaagccccaggcaagggcctggagtgggtgagcagcatcagcaccagcagcaactacatctactacgccgacagcgtgaagggccgcttcaccttcagccgcgacaacgccaagaacagcctggacctgcagatgagcggtctgcgcgccgaggacaccgccatctactactgcacccgcggttggggcccattcgactactggggccagggcaccctggtgaccgtgagcagcggcggatctgagggaaagtccagcggctccggcagcgaaagcaagtccaccggcggaagcgacatccagatgacccagagcccaagcagcctgagcgccagcgtcggcgaccgcgtgaccatcacctgtcgtgcccgccagagcatcggcaccgccatccactggtaccagcagaagccaggcaaggccccaaagctgctgatctactacgccagcgagagcatcagcggtgtgccaagccgcttcagcggcagcggcagcggcaccgacttcaccctgaccatcagcagcctgcagccagaggacttcgccacctactactgccagcagagcggcagctggccatacaccttcggccagggcaccaagctggagatcaaggagcccaaatctagcgacaaaactcacacatgtccaccgtgcccagcacctgaagcagcagggggaccgtcagtcttcctcttccccccaaaacccaaggacaccctcatgatctcccggacccctgaggtcacatgcgtggtggtgagcgtgagccacgaagaccctgaggtcaagttcaactggtacgtggacggcgtggaggtgcataatgccaagacaaagccgcgggaggagcagtacaacagcacgtaccgtgtggtcagcgtcctcaccgtcctgcaccaggactggctgaatggcaaggagtacaagtgcaaggtctccaacaaagccctcccagcccccatcgagaaaaccatctccaaagccaaagggcagccccgagaaccacaggtgtacgtgtaccccccatcccgggaggagatgaccaagaaccaggtcagcctgacctgcctggtcaaaggcttctatcccagcgacatcgccgtggagtgggagagcaatgggcagccggagaacaactacaagaccacgcctcccgtgctggactccgacggctccttcgccctcgtgagcaagctcaccgtggacaagtctagatggcagcaggggaacgtcttctcatgctccgtgatgcatgaggctctgcacaaccactacacgcagaagagcctctccctgtctccgggtaaa

SEQ ID NO: 401 - DNA, 1425 bp, Artificial Sequence
  Description of Artificial Sequence: Synthetic polynucleotide
gacatccagatgacccagagcccaagcagcctgagcgccagcgtcggcgaccgcgtgaccatcacctgtcgtgcccgccagagcatcggcaccgccatccactggtaccagcagaagccaggcaaggccccaaagctgctgatctactacgccagcgagagcatcagcggtgtgccaagccgcttcagcggcagcggcagcggcaccgacttcaccctgaccatcagcagcctgcagccagaggacttcgccacctactactgccagcagagcggcagctggccatacaccttcggccagggcaccaagctggagatcaagggcggatctgagggaaagtccagcggctccggcagcgaaagcaagtccaccggcggaagcgaggtgcagctggtggagagcggtggcggtctggtgaagccaggtggcagcctgcgcctgagctgtgccgccagcggtttcaccttcagccgctacaacatgaactgggtgcgccaagccccaggcaagggcctggagtgggtgagcagcatcagcaccagcagcaactacatctactacgccgacagcgtgaagggccgcttcaccttcagccgcgacaacgccaagaacagcctggacctgcagatgagcggtctgcgcgccgaggacaccgccatctactactgcacccgcggttggggcccattcgactactggggccagggcaccctggtgaccgtgagcagcgagcccaaatctagcgacaaaactcacacatgtccaccgtgcccagcacctgaagcagcagggggaccgtcagtcttcctcttccccccaaaacccaaggacaccctcatgatctcccggacccctgaggtcacatgcgtggtggtgagcgtgagccacgaagaccctgaggtcaagttcaactggtacgtggacggcgtggaggtgcataatgccaagacaaagccgcgggaggagcagtacaacagcacgtaccgtgtggtcagcgtcctcaccgtcctgcaccaggactggctgaatggcaaggagtacaagtgcaaggtctccaacaaagccctcccagcccccatcgagaaaaccatctccaaagccaaagggcagccccgagaaccacaggtgtacgtgtaccccccatcccgggaggagatgaccaagaaccaggtcagcctgacctgcctggtcaaaggcttctatcccagcgacatcgccgtggagtgggagagcaatgggcagccggagaacaactacaagaccacgcctcccgtgctggactccgacggctccttcgccctcgtgagcaagctcaccgtggacaagtctagatggcagcaggggaacgtcttctcatgctccgtgatgcatgaggctctgcacaaccactacacgcagaagagcctctccctgtctccgggtaaa

SEQ ID NO: 402 - DNA, 1425 bp, Artificial Sequence
  Description of Artificial Sequence: Synthetic polynucleotide
gaggtgcaactggtggagtctgggggaggcctggtcaagcctggggggtccctgagactctcctgtgcagcctctggattcaccttcagtagatataacatgaactgggtccgccaggctccagggaaggggctggagtgggtctcatccattagtactagtagtaattacatatactacgcagactcagtgaagggccgattcaccttctccagagacaacgccaagaactcactggatctgcaaatgagcggcctgagagccgaggacacggctatttattactgtacgagaggctgggggccttttgactactggggccagggaaccctggtcaccgtctcctcaggcggatctgagggaaagtccagcggctccggcagcgaaagcaagtccaccggcggaagcgacatcttgctgactcagtctccaggcatcctgtctgtgagtccaggagaaagagtcagtttctcctgcagggccagacagagcattggcacagccatacactggtatcagcaaagaacaaatggttctccaaggcttctcataaagtatgcttctgagtctatctctgggatcccttccaggtttagcggcagtggatcagggacagattttactcttaccatcaacagtgtggagtctgaagatattgcagattattactgtcaacaaagtgggagctggccgtacacgttcggaggggggaccaagctggaaataaaagagcccaaatctagcgacaaaactcacacatgtccaccgtgcccagcacctgaagcagcagggggaccgtcagtcttcctcttccccccaaaacccaaggacaccctcatgatctcccggacccctgaggtcacatgcgtggtggtgagcgtgagccacgaagaccctgaggtcaagttcaactggtacgtggacggcgtggaggtgcataatgccaagacaaagccgcgggaggagcagtacaacagcacgtaccgtgtggtcagcgtcctcaccgtcctgcaccaggactggctgaatggcaaggagtacaagtgcaaggtctccaacaaagccctcccagcccccatcgagaaaaccatctccaaagccaaagggcagccccgagaaccacaggtgtacgtgtaccccccatcccgggaggagatgaccaagaaccaggtcagcctgacctgcctggtcaaaggcttctatcccagcgacatcgccgtggagtgggagagcaatgggcagccggagaacaactacaagaccacgcctcccgtgctggactccgacggctccttcgccctcgtgagcaagctcaccgtggacaagtctagatggcagcaggggaacgtcttctcatgctccgtgatgcatgaggctctgcacaaccactacacgcagaagagcctctccctgtctccgggtaaa

SEQ ID NO: 403 - DNA, 1425 bp, Artificial Sequence
  Description of Artificial Sequence: Synthetic polynucleotide
gacatcttgctgactcagtctccaggcatcctgtctgtgagtccaggagaaagagtcagtttctcctgcagggccagacagagcattggcacagccatacactggtatcagcaaagaacaaatggttctccaaggcttctcataaagtatgcttctgagtctatctctgggatcccttccaggtttagcggcagtggatcagggacagattttactcttaccatcaacagtgtggagtctgaagatattgcagattattactgtcaacaaagtgggagctggccgtacacgttcggaggggggaccaagctggaaataaaaggcggatctgagggaaagtccagcggctccggcagcgaaagcaagtccaccggcggaagcgaggtgcaactggtggagtctgggggaggcctggtcaagcctggggggtccctgagactctcctgtgcagcctctggattcaccttcagtagatataacatgaactgggtccgccaggctccagggaaggggctggagtgggtctcatccattagtactagtagtaattacatatactacgcagactcagtgaagggccgattcaccttctccagagacaacgccaagaactcactggatctgcaaatgagcggcctgagagccgaggacacggctatttattactgtacgagaggctgggggccttttgactactggggccagggaaccctggtcaccgtctcctcagagcccaaatctagcgacaaaactcacacatgtccaccgtgcccagcacctgaagcagcagggggaccgtcagtcttcctcttccccccaaaacccaaggacaccctcatgatctcccggacccctgaggtcacatgcgtggtggtgagcgtgagccacgaagaccctgaggtcaagttcaactggtacgtggacggcgtggaggtgcataatgccaagacaaagccgcgggaggagcagtacaacagcacgtaccgtgtggtcagcgtcctcaccgtcctgcaccaggactggctgaatggcaaggagtacaagtgcaaggtctccaacaaagccctcccagcccccatcgagaaaaccatctccaaagccaaagggcagccccgagaaccacaggtgtacgtgtaccccccatcccgggaggagatgaccaagaaccaggtcagcctgacctgcctggtcaaaggcttctatcccagcgacatcgccgtggagtgggagagcaatgggcagccggagaacaactacaagaccacgcctcccgtgctggactccgacggctccttcgccctcgtgagcaagctcaccgtggacaagtctagatggcagcaggggaacgtcttctcatgctccgtgatgcatgaggctctgcacaaccactacacgcagaagagcctctccctgtctccgggtaaa

SEQ ID NO: 404 - protein, 252 aa, Artificial Sequence
  Description of Artificial Sequence: Synthetic polypeptide
QVQLQESGPGLVKPSETLSLTCTVSGGSISSYYWSWIRQPPGKGLEWIGYIYYSGSTNYNPSLKSRVTISVDTSKNQFSLKLSSVTAADTAVYYCAGTTIFGVVTPNFYYGMDVWGQGTTVTVSSGGSEGKSSGSGSESKSTGGSDIQMTQSPSFLSASVGDRVTITCRASQGISSYLAWYQQKPGKAPKFLIYAASTLQSGVPSRFSGSGSGTEFTLTISSLQPEDFATYYCQQLNSYPLTFGGGTKVEIK

SEQ ID NO: 405 - protein, 252 aa, Artificial Sequence
  Description of Artificial Sequence: Synthetic polypeptide
DIQMTQSPSFLSASVGDRVTITCRASQGISSYLAWYQQKPGKAPKFLIYAASTLQSGVPSRFSGSGSGTEFTLTISSLQPEDFATYYCQQLNSYPLTFGGGTKVEIKGGSEGKSSGSGSESKSTGGSQVQLQESGPGLVKPSETLSLTCTVSGGSISSYYWSWIRQPPGKGLEWIGYIYYSGSTNYNPSLKSRVTISVDTSKNQFSLKLSSVTAADTAVYYCAGTTIFGVVTPNFYYGMDVWGQGTTVTVSS

SEQ ID NO: 406 - protein, 250 aa, Artificial Sequence
  Description of Artificial Sequence: Synthetic polypeptide
EVQLVESGGGVVQPGRSLRLSCVASGFTFSSYDIHWVRQAPGKGLEWVAIISYDGSKKDYTDSVKGRFTISRDNSKNTLYLQMDSLRVEDSAVYSCARESGWSHYYYYGMDVWGQGTMVTVSSGGSEGKSSGSGSESKSTGGSDIVMTQSPSSLSASVGDRVTITCRASQDISNYLAWYQQKPGKVPKFLIYAASTLHSGVPSRFSGSGSGTDFTLTISSLQPEDVATYYCQKYNSAPYTFGQGTRLEIK

SEQ ID NO: 407 - protein, 250 aa, Artificial Sequence
  Description of Artificial Sequence: Synthetic polypeptide
DIVMTQSPSSLSASVGDRVTITCRASQDISNYLAWYQQKPGKVPKFLIYAASTLHSGVPSRFSGSGSGTDFTLTISSLQPEDVATYYCQKYNSAPYTFGQGTRLEIKGGSEGKSSGSGSESKSTGGSEVQLVESGGGVVQPGRSLRLSCVASGFTFSSYDIHWVRQAPGKGLEWVAIISYDGSKKDYTDSVKGRFTISRDNSKNTLYLQMDSLRVEDSAVYSCARESGWSHYYYYGMDVWGQGTMVTVSS

SEQ ID NO: 408 - protein, 245 aa, Artificial Sequence
  Description of Artificial Sequence: Synthetic polypeptide
QVQLQESGPGLVKPSETLSLTCTVSGGSISSYYWSWLRQPAGSGLEWIGRLYVSGFTNYNPSLKSRVTLSLDPSRNQLSLKLSSVTAADTAVYYCAGDSGNYWGWFDPWGQGTLVTVSSGGSEGKSSGSGSESKSTGGSSYELTQPPSVSVSPGETASITCSGDQLGENYACWYQQKPGQSPVLVIYQDSKRPSGIPERFSGSNSGNTATLTISGTQALDEADYYCQAWDNSIVVFGGGTKLTVL

SEQ ID NO: 409 - protein, 245 aa, Artificial Sequence
  Description of Artificial Sequence: Synthetic polypeptide
SYELTQPPSVSVSPGETASITCSGDQLGENYACWYQQKPGQSPVLVIYQDSKRPSGIPERFSGSNSGNTATLTISGTQALDEADYYCQAWDNSIVVFGGGTKLTVLGGSEGKSSGSGSESKSTGGSQVQLQESGPGLVKPSETLSLTCTVSGGSISSYYWSWLRQPAGSGLEWIGRLYVSGFTNYNPSLKSRVTLSLDPSRNQLSLKLSSVTAADTAVYYCAGDSGNYWGWFDPWGQGTLVTVSS

SEQ ID NO: 410 - protein, 267 aa, Artificial Sequence
  Description of Artificial Sequence: Synthetic polypeptide
MAWVWTLLFLMAAAQSIQAQVQLQESGPGLVKPSQTLSLTCTVSGNSITSDYAWNWIRQFPGKGLEWIGYISYSGSTTYNPSLKSRVTISRDTSKNQFSLKLSSVTAADTAVYYCATGYYYGSGFWGQGTLVTVSSGGSEGKSSGSGSESKSTGGSDIVLTQSPDSLAVSLGERATINCRASESVEYFGTSLMHWYQQKPGQPPKLLIYAASNVESGVPDRFSGSGSGTDFTLTISSLQAEDVAVYFCQQTRKVPYTFGGGTKVEIK

SEQ ID NO: 411 - protein, 267 aa, Artificial Sequence
  Description of Artificial Sequence: Synthetic polypeptide
MAWVWTLLFLMAAAQSIQADIVLTQSPDSLAVSLGERATINCRASESVEYFGTSLMHWYQQKPGQPPKLLIYAASNVESGVPDRFSGSGSGTDFTLTISSLQAEDVAVYFCQQTRKVPYTFGGGTKVEIKGGSEGKSSGSGSESKSTGGSQVQLQESGPGLVKPSQTLSLTCTVSGNSITSDYAWNWIRQFPGKGLEWIGYISYSGSTTYNPSLKSRVTISRDTSKNQFSLKLSSVTAADTAVYYCATGYYYGSGFWGQGTLVTVSS

SEQ ID NO: 412 - protein, 267 aa, Artificial Sequence
  Description of Artificial Sequence: Synthetic polypeptide
MAWVWTLLFLMAAAQSIQAQVQLQESGPGLVKPSQTLSLTCTVSGNSITSDYAWNWIRQPPGKGLEWIGYISYSGSTTYNPSLKSRVTISRDTSKNQFSLKLSSVTAADTAVYYCATGYYYGSGFWGQGTLVTVSSGGSEGKSSGSGSESKSTGGSEIVLTQSPATLSLSPGERATLSCRASESVEYFGTSLMHWYQQKPGQPPRLLIYAASNVESGIPARFSGSGSGTDFTLTISSVEPEDFAVYFCQQTRKVPYTFGGGTKVEIK

SEQ ID NO: 413 - protein, 267 aa, Artificial Sequence
  Description of Artificial Sequence: Synthetic polypeptide
MAWVWTLLFLMAAAQSIQAEIVLTQSPATLSLSPGERATLSCRASESVEYFGTSLMHWYQQKPGQPPRLLIYAASNVESGIPARFSGSGSGTDFTLTISSVEPEDFAVYFCQQTRKVPYTFGGGTKVEIKGGSEGKSSGSGSESKSTGGSQVQLQESGPGLVKPSQTLSLTCTVSGNSITSDYAWNWIRQPPGKGLEWIGYISYSGSTTYNPSLKSRVTISRDTSKNQFSLKLSSVTAADTAVYYCATGYYYGSGFWGQGTLVTVSS

SEQ ID NO: 414 - protein, 267 aa, Artificial Sequence
  Description of Artificial Sequence: Synthetic polypeptide
MAWVWTLLFLMAAAQSIQAQVQLQESGPGLVKPSQTLSLTCTVSGNSITSDYAWNWIRQFPGKGLEWIGYISYSGSTTYNPSLKSRVTISRDTSKNQFSLKLSSVTAADTAVYYCATGYYYGSGFWGQGTLVTVSSGGSEGKSSGSGSESKSTGGSEIVLTQSPATLSLSPGERATLSCRASESVEYFGTSLMHWYQQKPGQPPRLLIYAASNVESGIPARFSGSGSGTDFTLTISSVEPEDFAVYFCQQTRKVPYTFGGGTKVEIK

SEQ ID NO: 415 - protein, 267 aa, Artificial Sequence
  Description of Artificial Sequence: Synthetic polypeptide
MAWVWTLLFLMAAAQSIQAEIVLTQSPATLSLSPGERATLSCRASESVEYFGTSLMHWYQQKPGQPPRLLIYAASNVESGIPARFSGSGSGTDFTLTISSVEPEDFAVYFCQQTRKVPYTFGGGTKVEIKGGSEGKSSGSGSESKSTGGSQVQLQESGPGLVKPSQTLSLTCTVSGNSITSDYAWNWIRQFPGKGLEWIGYISYSGSTTYNPSLKSRVTISRDTSKNQFSLKLSSVTAADTAVYYCATGYYYGSGFWGQGTLVTVSS

SEQ ID NO: 416 - protein, 271 aa, Artificial Sequence
  Description of Artificial Sequence: Synthetic polypeptide
MAWVWTLLFLMAAAQSIQAQVQLQESGPGLVKPSETLSLTCTVSGGSISSYYWSWIRQPPGKGLEWIGYIYYSGSTNYNPSLKSRVTISVDTSKNQFSLKLSSVTAADTAVYYCAGTTIFGVVTPNFYYGMDVWGQGTTVTVSSGGSEGKSSGSGSESKSTGGSDIQMTQSPSFLSASVGDRVTITCRASQGISSYLAWYQQKPGKAPKFLIYAASTLQSGVPSRFSGSGSGTEFTLTISSLQPEDFATYYCQQLNSYPLTFGGGTKVEIK

SEQ ID NO: 417 - protein, 271 aa, Artificial Sequence
  Description of Artificial Sequence: Synthetic polypeptide
MAWVWTLLFLMAAAQSIQADIQMTQSPSFLSASVGDRVTITCRASQGISSYLAWYQQKPGKAPKFLIYAASTLQSGVPSRFSGSGSGTEFTLTISSLQPEDFATYYCQQLNSYPLTFGGGTKVEIKGGSEGKSSGSGSESKSTGGSQVQLQESGPGLVKPSETLSLTCTVSGGSISSYYWSWIRQPPGKGLEWIGYIYYSGSTNYNPSLKSRVTISVDTSKNQFSLKLSSVTAADTAVYYCAGTTIFGVVTPNFYYGMDVWGQGTTVTVSS

SEQ ID NO: 418 - protein, 269 aa, Artificial Sequence
  Description of Artificial Sequence: Synthetic polypeptide
MAWVWTLLFLMAAAQSIQAEVQLVESGGGVVQPGRSLRLSCVASGFTFSSYDIHWVRQAPGKGLEWVAIISYDGSKKDYTDSVKGRFTISRDNSKNTLYLQMDSLRVEDSAVYSCARESGWSHYYYYGMDVWGQGTMVTVSSGGSEGKSSGSGSESKSTGGSDIVMTQSPSSLSASVGDRVTITCRASQDISNYLAWYQQKPGKVPKFLIYAASTLHSGVPSRFSGSGSGTDFTLTISSLQPEDVATYYCQKYNSAPYTFGQGTRLEIK

SEQ ID NO: 419 - protein, 269 aa, Artificial Sequence
  Description of Artificial Sequence: Synthetic polypeptide
MAWVWTLLFLMAAAQSIQADIVMTQSPSSLSASVGDRVTITCRASQDISNYLAWYQQKPGKVPKFLIYAASTLHSGVPSRFSGSGSGTDFTLTISSLQPEDVATYYCQKYNSAPYTFGQGTRLEIKGGSEGKSSGSGSESKSTGGSEVQLVESGGGVVQPGRSLRLSCVASGFTFSSYDIHWVRQAPGKGLEWVAIISYDGSKKDYTDSVKGRFTISRDNSKNTLYLQMDSLRVEDSAVYSCARESGWSHYYYYGMDVWGQGTMVTVSS

SEQ ID NO: 420 - protein, 264 aa, Artificial Sequence
  Description of Artificial Sequence: Synthetic polypeptide
MAWVWTLLFLMAAAQSIQAQVQLQESGPGLVKPSETLSLTCTVSGGSISSYYWSWLRQPAGSGLEWIGRLYVSGFTNYNPSLKSRVTLSLDPSRNQLSLKLSSVTAADTAVYYCAGDSGNYWGWFDPWGQGTLVTVSSGGSEGKSSGSGSESKSTGGSSYELTQPPSVSVSPGETASITCSGDQLGENYACWYQQKPGQSPVLVIYQDSKRPSGIPERFSGSNSGNTATLTISGTQALDEADYYCQAWDNSIVVFGGGTKLTVL

SEQ ID NO: 421 - protein, 264 aa, Artificial Sequence
  Description of Artificial Sequence: Synthetic polypeptide
MAWVWTLLFLMAAAQSIQASYELTQPPSVSVSPGETASITCSGDQLGENYACWYQQKPGQSPVLVIYQDSKRPSGIPERFSGSNSGNTATLTISGTQALDEADYYCQAWDNSIVVFGGGTKLTVLGGSEGKSSGSGSESKSTGGSQVQLQESGPGLVKPSETLSLTCTVSGGSISSYYWSWLRQPAGSGLEWIGRLYVSGFTNYNPSLKSRVTLSLDPSRNQLSLKLSSVTAADTAVYYCAGDSGNYWGWFDPWGQGTLVTVSS

SEQ ID NO: 422 - protein, 268 aa, Artificial Sequence
  Description of Artificial Sequence: Synthetic polypeptide
MAWVWTLLFLMAAAQSIQAQVQLVESGGGVVQPGRSLRLSCAASGFTFSYYGMHWVRQAPGKGLEWVAFISYDGSNKYYADSVKGRFTISRDNSKNTLYLQMNSLRAEDTAVYYCAHLPYSGSYWAFDYWGQGTQVTVSSGGSEGKSSGSGSESKSTGGSQSVLTQPPSVSVAPGQTASITCGGDNIGSKSVHWYQQKPGQAPVLVVYDNSDRPSGIPERFSGSNSGTTATLTISRVEAGDEADYYCQVWDSSSDHPVVFGGGTKVTV

SEQ ID NO: 423 - protein, 287 aa, Artificial Sequence
  Description of Artificial Sequence: Synthetic polypeptide
MAWVWTLLFLMAAAQSIQAQSVLTQPPSVSVAPGQTASITCGGDNIGSKSVHWYQQKPGQAPVLVVYDNSDRPSGIPERFSGSNSGTTATLTISRVEAGDEADYYCQVWDSSSDHPVVFGGGTKVTVGGSEGKSSGSGSESKSTGGSMAWVWTLLFLMAAAQSIQAQVQLVESGGGVVQPGRSLRLSCAASGFTFSYYGMHWVRQAPGKGLEWVAFISYDGSNKYYADSVKGRFTISRDNSKNTLYLQMNSLRAEDTAVYYCAHLPYSGSYWAFDYWGQGTQVTVSS

SEQ ID NO: 424 - protein, 253 aa, Artificial Sequence; identical to SEQ ID NO: 308
  Description of Artificial Sequence: Synthetic polypeptide

SEQ ID NO: 425 - protein, 272 aa, Artificial Sequence
  Description of Artificial Sequence: Synthetic polypeptide
MAWVWTLLFLMAAAQSIQASSELTQPPSVSVAPGQTARITCGGNNIGSKSVHWYQQKPGQAPVLVVYDDSDRPSGIPERFSGSNSGNTATLTISRVEAGDEADYYCQVWDSSSDHVVFGGGTKLTVLGGSEGKSSGSGSESKSTGGSQVQLVESGGGLVQPGGSLRLSCAASGFTFSHYAMSWVRQAPGKGLEWVSTIGGSGGSTYYADSVKGRFTISRDNSKNTLYLQMNSLRAEDTAVYYCAKPHIVMVTALLYDGMDVWGQGTMVTVSS

SEQ ID NO: 426 - protein, 471 aa, Artificial Sequence
  Description of Artificial Sequence: Synthetic polypeptide
QVQLQESGPGLVKPSQTLSLTCTVSGNSITSDYAWNWIRQFPGKGLEWIGYISYSGSTTYNPSLKSRVTISRDTSKNQFSLKLSSVTAADTAVYYCATGYYYGSGFWGQGTLVTVSSGGSEGKSSGSGSESKSTGGSDIVLTQSPDSLAVSLGERATINCRASESVEYFGTSLMHWYQQKPGQPPKLLIYAASNVESGVPDRFSGSGSGTDFTLTISSLQAEDVAVYFCQQTRKVPYTFGGGTKVEIKTSTPAPRPPTPAPTIASQPLSLRPEACRPAAGGAVHTRGLDFACDIYIWAPLAGTCGVLLLSLVITLYCKRGRKKLLYIFKQPFMRPVQTTQEEDGCSCRFPEEEEGGCELRVKFSRSADAPAYKQGQNQLYNELNLGRREEYDVLDKRRGRDPEMGGKPRRKNPQEGLYNELQKDKMAEAYSEIGMKGERRRGKGHDGLYQGLSTATKDTYDALHMQALPPR

SEQ ID NO: 427 - protein, 471 aa, Artificial Sequence
  Description of Artificial Sequence: Synthetic polypeptide
DIVLTQSPDSLAVSLGERATINCRASESVEYFGTSLMHWYQQKPGQPPKLLIYAASNVESGVPDRFSGSGSGTDFTLTISSLQAEDVAVYFCQQTRKVPYTFGGGTKVEIKGGSEGKSSGSGSESKSTGGSQVQLQESGPGLVKPSQTLSLTCTVSGNSITSDYAWNWIRQFPGKGLEWIGYISYSGSTTYNPSLKSRVTISRDTSKNQFSLKLSSVTAADTAVYYCATGYYYGSGFWGQGTLVTVSSTSTPAPRPPTPAPTIASQPLSLRPEACRPAAGGAVHTRGLDFACDIYIWAPLAGTCGVLLLSLVITLYCKRGRKKLLYIFKQPFMRPVQTTQEEDGCSCRFPEEEEGGCELRVKFSRSADAPAYKQGQNQLYNELNLGRREEYDVLDKRRGRDPEMGGKPRRKNPQEGLYNELQKDKMAEAYSEIGMKGERRRGKGHDGLYQGLSTATKDTYDALHMQALPPR

SEQ ID NO: 428 - protein, 471 aa, Artificial Sequence
  Description of Artificial Sequence: Synthetic polypeptide
QVQLQESGPGLVKPSQTLSLTCTVSGNSITSDYAWNWIRQPPGKGLEWIGYISYSGSTTYNPSLKSRVTISRDTSKNQFSLKLSSVTAADTAVYYCATGYYYGSGFWGQGTLVTVSSGGSEGKSSGSGSESKSTGGSEIVLTQSPATLSLSPGERATLSCRASESVEYFGTSLMHWYQQKPGQPPRLLIYAASNVESGIPARFSGSGSGTDFTLTISSVEPEDFAVYFCQQTRKVPYTFGGGTKVEIKTSTPAPRPPTPAPTIASQPLSLRPEACRPAAGGAVHTRGLDFACDIYIWAPLAGTCGVLLLSLVITLYCKRGRKKLLYIFKQPFMRPVQTTQEEDGCSCRFPEEEEGGCELRVKFSRSADAPAYKQGQNQLYNELNLGRREEYDVLDKRRGRDPEMGGKPRRKNPQEGLYNELQKDKMAEAYSEIGMKGERRRGKGHDGLYQGLSTATKDTYDALHMQALPPR

SEQ ID NO: 429 - protein, 471 aa, Artificial Sequence; identical to SEQ ID NO: 428
  Description of Artificial Sequence: Synthetic polypeptide

SEQ ID NO: 430 - protein, 471 aa, Artificial Sequence
  Description of Artificial Sequence: Synthetic polypeptide
QVQLQESGPGLVKPSQTLSLTCTVSGNSITSDYAWNWIRQFPGKGLEWIGYISYSGSTTYNPSLKSRVTISRDTSKNQFSLKLSSVTAADTAVYYCATGYYYGSGFWGQGTLVTVSSGGSEGKSSGSGSESKSTGGSEIVLTQSPATLSLSPGERATLSCRASESVEYFGTSLMHWYQQKPGQPPRLLIYAASNVESGIPARFSGSGSGTDFTLTISSVEPEDFAVYFCQQTRKVPYTFGGGTKVEIKTSTPAPRPPTPAPTIASQPLSLRPEACRPAAGGAVHTRGLDFACDIYIWAPLAGTCGVLLLSLVITLYCKRGRKKLLYIFKQPFMRPVQTTQEEDGCSCRFPEEEEGGCELRVKFSRSADAPAYKQGQNQLYNELNLGRREEYDVLDKRRGRDPEMGGKPRRKNPQEGLYNELQKDKMAEAYSEIGMKGERRRGKGHDGLYQGLSTATKDTYDALHMQALPPR

SEQ ID NO: 431 - protein, 471 aa, Artificial Sequence; identical to SEQ ID NO: 430
  Description of Artificial Sequence: Synthetic polypeptide

SEQ ID NO: 432 - protein, 475 aa, Artificial Sequence
  Description of Artificial Sequence: Synthetic polypeptide
QVQLQESGPGLVKPSETLSLTCTVSGGSISSYYWSWIRQPPGKGLEWIGYIYYSGSTNYNPSLKSRVTISVDTSKNQFSLKLSSVTAADTAVYYCAGTTIFGVVTPNFYYGMDVWGQGTTVTVSSGGSEGKSSGSGSESKSTGGSDIQMTQSPSFLSASVGDRVTITCRASQGISSYLAWYQQKPGKAPKFLIYAASTLQSGVPSRFSGSGSGTEFTLTISSLQPEDFATYYCQQLNSYPLTFGGGTKVEIKTSTPAPRPPTPAPTIASQPLSLRPEACRPAAGGAVHTRGLDFACDIYIWAPLAGTCGVLLLSLVITLYCKRGRKKLLYIFKQPFMRPVQTTQEEDGCSCRFPEEEEGGCELRVKFSRSADAPAYKQGQNQLYNELNLGRREEYDVLDKRRGRDPEMGGKPRRKNPQEGLYNELQKDKMAEAYSEIGMKGERRRGKGHDGLYQGLSTATKDTYDALHMQALPPR

SEQ ID NO: 433 - protein, 475 aa, Artificial Sequence
  Description of Artificial Sequence: Synthetic polypeptide
DIQMTQSPSFLSASVGDRVTITCRASQGISSYLAWYQQKPGKAPKFLIYAASTLQSGVPSRFSGSGSGTEFTLTISSLQPEDFATYYCQQLNSYPLTFGGGTKVEIKGGSEGKSSGSGSESKSTGGSQVQLQESGPGLVKPSETLSLTCTVSGGSISSYYWSWIRQPPGKGLEWIGYIYYSGSTNYNPSLKSRVTISVDTSKNQFSLKLSSVTAADTAVYYCAGTTIFGVVTPNFYYGMDVWGQGTTVTVSSTSTPAPRPPTPAPTIASQPLSLRPEACRPAAGGAVHTRGLDFACDIYIWAPLAGTCGVLLLSLVITLYCKRGRKKLLYIFKQPFMRPVQTTQEEDGCSCRFPEEEEGGCELRVKFSRSADAPAYKQGQNQLYNELNLGRREEYDVLDKRRGRDPEMGGKPRRKNPQEGLYNELQKDKMAEAYSEIGMKGERRRGKGHDGLYQGLSTATKDTYDALHMQALPPR

SEQ ID NO: 434 - protein, 473 aa, Artificial Sequence
  Description of Artificial Sequence: Synthetic polypeptide
EVQLVESGGGVVQPGRSLRLSCVASGFTFSSYDIHWVRQAPGKGLEWVAIISYDGSKKDYTDSVKGRFTISRDNSKNTLYLQMDSLRVEDSAVYSCARESGWSHYYYYGMDVWGQGTMVTVSSGGSEGKSSGSGSESKSTGGSDIVMTQSPSSLSASVGDRVTITCRASQDISNYLAWYQQKPGKVPKFLIYAASTLHSGVPSRFSGSGSGTDFTLTISSLQPEDVATYYCQKYNSAPYTFGQGTRLEIKTSTPAPRPPTPAPTIASQPLSLRPEACRPAAGGAVHTRGLDFACDIYIWAPLAGTCGVLLLSLVITLYCKRGRKKLLYIFKQPFMRPVQTTQEEDGCSCRFPEEEEGGCELRVKFSRSADAPAYKQGQNQLYNELNLGRREEYDVLDKRRGRDPEMGGKPRRKNPQEGLYNELQKDKMAEAYSEIGMKGERRRGKGHDGLYQGLSTATKDTYDALHMQALPPR

SEQ ID NO: 435 - protein, 473 aa, Artificial Sequence
  Description of Artificial Sequence: Synthetic polypeptide
DIVMTQSPSSLSASVGDRVTITCRASQDISNYLAWYQQKPGKVPKFLIYAASTLHSGVPSRFSGSGSGTDFTLTISSLQPEDVATYYCQKYNSAPYTFGQGTRLEIKGGSEGKSSGSGSESKSTGGSEVQLVESGGGVVQPGRSLRLSCVASGFTFSSYDIHWVRQAPGKGLEWVAIISYDGSKKDYTDSVKGRFTISRDNSKNTLYLQMDSLRVEDSAVYSCARESGWSHYYYYGMDVWGQGTMVTVSSTSTPAPRPPTPAPTIASQPLSLRPEACRPAAGGAVHTRGLDFACDIYIWAPLAGTCGVLLLSLVITLYCKRGRKKLLYIFKQPFMRPVQTTQEEDGCSCRFPEEEEGGCELRVKFSRSADAPAYKQGQNQLYNELNLGRREEYDVLDKRRGRDPEMGGKPRRKNPQEGLYNELQKDKMAEAYSEIGMKGERRRGKGHDGLYQGLSTATKDTYDALHMQALPPR

SEQ ID NO: 436 - protein, 468 aa, Artificial Sequence
  Description of Artificial Sequence: Synthetic polypeptide
QVQLQESGPGLVKPSETLSLTCTVSGGSISSYYWSWLRQPAGSGLEWIGRLYVSGFTNYNPSLKSRVTLSLDPSRNQLSLKLSSVTAADTAVYYCAGDSGNYWGWFDPWGQGTLVTVSSGGSEGKSSGSGSESKSTGGSSYELTQPPSVSVSPGETASITCSGDQLGENYACWYQQKPGQSPVLVIYQDSKRPSGIPERFSGSNSGNTATLTISGTQALDEADYYCQAWDNSIVVFGGGTKLTVLTSTPAPRPPTPAPTIASQPLSLRPEACRPAAGGAVHTRGLDFACDIYIWAPLAGTCGVLLLSLVITLYCKRGRKKLLYIFKQPFMRPVQTTQEEDGCSCRFPEEEEGGCELRVKFSRSADAPAYKQGQNQLYNELNLGRREEYDVLDKRRGRDPEMGGKPRRKNPQEGLYNELQKDKMAEAYSEIGMKGERRRGKGHDGLYQGLSTATKDTYDALHMQALPPR

SEQ ID NO: 437 - protein, 468 aa, Artificial Sequence
  Description of Artificial Sequence: Synthetic polypeptide
SYELTQPPSVSVSPGETASITCSGDQLGENYACWYQQKPGQSPVLVIYQDSKRPSGIPERFSGSNSGNTATLTISGTQALDEADYYCQAWDNSIVVFGGGTKLTVLGGSEGKSSGSGSESKSTGGSQVQLQESGPGLVKPSETLSLTCTVSGGSISSYYWSWLRQPAGSGLEWIGRLYVSGFTNYNPSLKSRVTLSLDPSRNQLSLKLSSVTAADTAVYYCAGDSGNYWGWFDPWGQGTLVTVSSTSTPAPRPPTPAPTIASQPLSLRPEACRPAAGGAVHTRGLDFACDIYIWAPLAGTCGVLLLSLVITLYCKRGRKKLLYIFKQPFMRPVQTTQEEDGCSCRFPEEEEGGCELRVKFSRSADAPAYKQGQNQLYNELNLGRREEYDVLDKRRGRDPEMGGKPRRKNPQEGLYNELQKDKMAEAYSEIGMKGERRRGKGHDGLYQGLSTATKDTYDALHMQALPPR

SEQ ID NO: 438 - protein, 472 aa, Artificial Sequence
  Description of Artificial Sequence: Synthetic polypeptide
QVQLVESGGGVVQPGRSLRLSCAASGFTFSYYGMHWVRQAPGKGLEWVAFISYDGSNKYYADSVKGRFTISRDNSKNTLYLQMNSLRAEDTAVYYCAHLPYSGSYWAFDYWGQGTQVTVSSGGSEGKSSGSGSESKSTGGSQSVLTQPPSVSVAPGQTASITCGGDNIGSKSVHWYQQKPGQAPVLVVYDNSDRPSGIPERFSGSNSGTTATLTISRVEAGDEADYYCQVWDSSSDHPVVFGGGTKVTVTSTPAPRPPTPAPTIASQPLSLRPEACRPAAGGAVHTRGLDFACDIYIWAPLAGTCGVLLLSLVITLYCKRGRKKLLYIFKQPFMRPVQTTQEEDGCSCRFPEEEEGGCELRVKFSRSADAPAYKQGQNQLYNELNLGRREEYDVLDKRRGRDPEMGGKPRRKNPQEGLYNELQKDKMAEAYSEIGMKGERRRGKGHDGLYQGLSTATKDTYDALHMQALPPR

SEQ ID NO: 439 - protein, 472 aa, Artificial Sequence
  Description of Artificial Sequence: Synthetic polypeptide
QSVLTQPPSVSVAPGQTASITCGGDNIGSKSVHWYQQKPGQAPVLVVYDNSDRPSGIPERFSGSNSGTTATLTISRVEAGDEADYYCQVWDSSSDHPVVFGGGTKVTVGGSEGKSSGSGSESKSTGGSQVQLVESGGGVVQPGRSLRLSCAASGFTFSYYGMHWVRQAPGKGLEWVAFISYDGSNKYYADSVKGRFTISRDNSKNTLYLQMNSLRAEDTAVYYCAHLPYSGSYWAFDYWGQGTQVTVSSTSTPAPRPPTPAPTIASQPLSLRPEACRPAAGGAVHTRGLDFACDIYIWAPLAGTCGVLLLSLVITLYCKRGRKKLLYIFKQPFMRPVQTTQEEDGCSCRFPEEEEGGCELRVKFSRSADAPAYKQGQNQLYNELNLGRREEYDVLDKRRGRDPEMGGKPRRKNPQEGLYNELQKDKMAEAYSEIGMKGERRRGKGHDGLYQGLSTATKDTYDALHMQALPPR

SEQ ID NO: 440 - protein, 476 aa, Artificial Sequence
  Description of Artificial Sequence: Synthetic polypeptide
QVQLVESGGGLVQPGGSLRLSCAASGFTFSHYAMSWVRQAPGKGLEWVSTIGGSGGSTYYADSVKGRFTISRDNSKNTLYLQMNSLRAEDTAVYYCAKPHIVMVTALLYDGMDVWGQGTMVTVSSGGSEGKSSGSGSESKSTGGSSSELTQPPSVSVAPGQTARITCGGNNIGSKSVHWYQQKPGQAPVLVVYDDSDRPSGIPERFSGSNSGNTATLTISRVEAGDEADYYCQVWDSSSDHVVFGGGTKLTVLTSTPAPRPPTPAPTIASQPLSLRPEACRPAAGGAVHTRGLDFACDIYIWAPLAGTCGVLLLSLVITLYCKRGRKKLLYIFKQPFMRPVQTTQEEDGCSCRFPEEEEGGCELRVKFSRSADAPAYKQGQNQLYNELNLGRREEYDVLDKRRGRDPEMGGKPRRKNPQEGLYNELQKDKMAEAYSEIGMKGERRRGKGHDGLYQGLSTATKDTYDALHMQALPPR

SEQ ID NO: 441 - protein, 476 aa, Artificial Sequence
  Description of Artificial Sequence: Synthetic polypeptide
SSELTQPPSVSVAPGQTARITCGGNNIGSKSVHWYQQKPGQAPVLVVYDDSDRPSGIPERFSGSNSGNTATLTISRVEAGDEADYYCQVWDSSSDHVVFGGGTKLTVLGGSEGKSSGSGSESKSTGGSQVQLVESGGGLVQPGGSLRLSCAASGFTFSHYAMSWVRQAPGKGLEWVSTIGGSGGSTYYADSVKGRFTISRDNSKNTLYLQMNSLRAEDTAVYYCAKPHIVMVTALLYDGMDVWGQGTMVTVSSTSTPAPRPPTPAPTIASQPLSLRPEACRPAAGGAVHTRGLDFACDIYIWAPLAGTCGVLLLSLVITLYCKRGRKKLLYIFKQPFMRPVQTTQEEDGCSCRFPEEEEGGCELRVKFSRSADAPAYKQGQNQLYNELNLGRREEYDVLDKRRGRDPEMGGKPRRKNPQEGLYNELQKDKMAEAYSEIGMKGERRRGKGHDGLYQGLSTATKDTYDALHMQALPPR

SEQ ID NO: 442 - protein, 207 aa, Homo sapiens
MQSGTHWRVLGLCLLSVGVWGQDGNEEMGGITQTPYKVSISGTTVILTCPQYPGSEILWQHNDKNIGGDEDDKNIGSDEDHLSLKEFSELEQSGYYVCYPRGSKPEDANFYLYLRARVCENCMEMDVMSVATIVIVDICITGGLLLLVYYWSKNRKAKAKPVTRGAGAGGRQRGQNKERPPPVPNPDYEPIRKGQRDLYSGLNQRRI

SEQ ID NO: 443 - protein, 104 aa, Homo sapiens
DGNEEMGGITQTPYKVSISGTTVILTCPQYPGSEILWQHNDKNIGGDEDDKNIGSDEDHLSLKEFSELEQSGYYVCYPRGSKPEDANFYLYLRARVCENCMEMD

SEQ ID NO: 444 - protein, 106 aa, Artificial Sequence
  Description of Artificial Sequence: Synthetic polypeptide
SYELTQPPSVSVSPGETASITCSGDQLGENYASWYQQKPGQSPVLVIYQDSKRPSGIPERFSGSNSGNTATLTISGTQALDEADYYCQAWDNSIVVFGGGTKLTVL

SEQ ID NO: 445 - protein, 212 aa, Artificial Sequence
  Description of Artificial Sequence: Synthetic polypeptide
SYELTQPPSVSVSPGETASITCSGDQLGENYASWYQQKPGQSPVLVIYQDSKRPSGIPERFSGSNSGNTATLTISGTQALDEADYYCQAWDNSIVVFGGGTKLTVLGQPKAAPSVTLFPPSSEELQANKATLVCLISDFYPGAVTVAWKADSSPVKAGVETTTPSKQSNNKYAASSYLSLTPEQWKSHRSYSCQVTHEGSTVEKTVAPTECS

SEQ ID NO: 446 - DNA, 636 bp, Artificial Sequence
  Description of Artificial Sequence: Synthetic polynucleotide
agttatgagctgactcaaccacccagtgtcagcgtatccccaggagaaactgcctctataacatgcagcggagaccagttgggagaaaattacgcctcctggtaccaacagaagcctggacaaagtcctgtcctcgttatttatcaagattctaaacgtccctctgggatccccgaacgattctccggctctaactctgggaataccgctaccttgacaataagtggtacacaggcacttgatgaagctgattattactgccaggcatgggataacagcattgtggttttcgggggcggcaccaaactcacagttctcggtcagcccaaggctgcacccagtgtcactctgttcccgccctcctctgaggagcttcaagccaacaaggccacactggtgtgtctcataagtgacttctacccgggagccgtgacagtggcctggaaggccgatagcagccccgtcaaggcgggagtggagaccaccacaccctccaaacaaagcaacaacaagtacgcggccagcagctatctgagcctgacgcctgagcagtggaagtcccacagaagctacagctgccaggtcacgcatgaagggagcaccgtggagaagacagtggcccctacagaatgttca

SEQ ID NO: 447 - protein, 106 aa, Homo sapiens
GQPKAAPSVTLFPPSSEELQANKATLVCLISDFYPGAVTVAWKADSSPVKAGVETTTPSKQSNNKYAASSYLSLTPEQWKSHRSYSCQVTHEGSTVEKTVAPTECS

SEQ ID NO: 448 - protein, 9 aa, Homo sapiens
GSDEDHLSL

SEQ ID NO: 449 - protein, 6 aa, Homo sapiens
PRGSKP

SEQ ID NO: 450 - DNA, 642 bp, Artificial Sequence
  Description of Artificial Sequence: Synthetic polynucleotide
gacatccagatgacccagtctccttccttcctgtctgcatctgtaggagacagagtcaccatcacttgccgggccagtcagggcattagcagttatttagcctggtatcagcaaaaaccagggaaagcccctaagttcctgatctatgctgcatccactttgcaaagtggggtcccatcaaggttcagcggcagtggatctgggacagaattcactctcacaatcagcagcctgcagcctgaagattttgcaacttattactgtcaacagcttaatagttaccctctcactttcggcggagggaccaaggtggaaatcaaacgtacggtggctgcaccatctgtcttcatcttcccgccatctgatgagcagttgaaatctggaactgcctctgttgtgtgcctgctgaataacttctatcccagagaggccaaagtacagtggaaggtggataacgccctccaatcgggtaactcccaggagagtgtcacagagcaggacagcaaggacagcacctacagcctcagcagcaccctgacgctgagcaaagcagactacgagaaacacaaagtctacgcctgcgaagtcacccatcagggcctgagctcgcccgtcacaaagagcttcaacaggggagagtgt

SEQ ID NO: 451 - DNA, 642 bp, Artificial Sequence
  Description of Artificial Sequence: Synthetic polynucleotide
gacatcgtgatgacccagtctccatcctccctgtctgcatctgtaggagacagagtcaccatcacttgccgggcgagtcaggacattagcaattatttagcctggtatcagcagaaaccagggaaagttcctaagttcctgatctatgctgcatccactttgcactctggggtcccatctcggttcagtggcagtggatctgggacagatttcactctcaccatcagcagcctgcagcctgaagatgttgcaacttattactgtcaaaagtataacagtgccccgtacacttttggccaagggacacgactggagattaaacgtacggtggctgcaccatctgtcttcatcttcccgccatctgatgagcagttgaaatctggaactgcctctgttgtgtgcctgctgaataacttctatcccagagaggccaaagtacagtggaaggtggataacgccctccaatcgggtaactcccaggagagtgtcacagagcaggacagcaaggacagcacctacagcctcagcagcaccctgacgctgagcaaagcagactacgagaaacacaaagtctacgcctgcgaagtcacccatcagggcctgagctcgcccgtcacaaagagcttcaacaggggagagtgt

SEQ ID NO: 452 - DNA, 642 bp, Artificial Sequence
  Description of Artificial Sequence: Synthetic polynucleotide
gacatccagatgacccagagcccaagcagcctgagcgccagcgtcggcgaccgcgtgaccatcacctgtcgtgcccgccagagcatcggcaccgccatccactggtaccagcagaagccaggcaaggccccaaagctgctgatcaagtacgccagcgagagcatcagcggtgtgccaagccgcttcagcggcagcggcagcggcaccgacttcaccctgaccatcagcagcctgcagccagaggacttcgccacctactactgccagcagagcggcagctggccatacaccttcggccagggcaccaagctggagatcaagcgtacggtggctgcaccatctgtcttcatcttcccgccatctgatgagcagttgaaatctggaactgcctctgttgtgtgcctgctgaataacttctatcccagagaggccaaagtacagtggaaggtggataacgccctccaatcgggtaactcccaggagagtgtcacagagcaggacagcaaggacagcacctacagcctcagcagcaccctgacgctgagcaaagcagactacgagaaacacaaagtctacgcctgcgaagtcacccatcagggcctgagctcgcccgtcacaaagagcttcaacaggggagagtgt

SEQ ID NO: 453 - protein, 475 aa, Artificial Sequence
  Description of Artificial Sequence: Synthetic polypeptide
DIQMTQSPSSLSASVGDRVTITCRARQSIGTAIHWYQQKPGKAPKLLIKYASESISGVPSRFSGSGSGTDFTLTISSVQPEDFATYYCQQSGSWPYTFGQGTKLEIKGGSEGKSSGSGSESKSTGGSEVQLVESGGGLVKPGGSLRLSCAASGFTFSRYNMNWVRQAPGKGLEWVSSISTSSNYIYYADSVKGRFTFSRDNAKNSLDLQMSGLRAEDTAIYYCTRGWGPFDYWGQGTLVTVSSEPKSSDKTHTCPPCPAPEAAGGPSVFLFPPKPKDTLMISRTPEVTCVVVSVSHEDPEVKFNWYVDGVEVHNAKTKPREEQYNSTYRVVSVLTVLHQDWLNGKEYKCKVSNKALPAPIEKTISKAKGQPREPQVYVYPPSREEMTKNQVSLTCLVKGFYPSDIAVEWESNGQPENNYKTTPPVLDSDGSFALVSKLTVDKSRWQQGNVFSCSVMHEALHNHYTQKSLSLSPGK

SEQ ID NO: 454 - protein, 240 aa, Artificial Sequence
  Description of Artificial Sequence: Synthetic polypeptide
VPLIEGRIVGGWECEKHSQPWQVAVYSHGWAHCGGVLVHPQWVLTAAHCLKKNSQVWLGRHNLFEPEDTGQRVPVSHSFPHPLYNMSLLKHQSLRPDEDSSHDLMLLRLSEPAKITDVVKVLGLPTQEPALGTTCYASGWGSIEPEEFLRPRSLQCVSLHYSEKVTEFMLCAGLWTGGKDTCGGDSGGPLVCNGVLQGITSWGPEPCALPEKPAVYTKVVHYRKWIKDTIAANPHHHHHH

SEQ ID NO: 455 - protein, 6 aa, Artificial Sequence
  Description of Artificial Sequence: Synthetic peptide
GFTFSH

SEQ ID NO: 456 - protein, 17 aa, Artificial Sequence
  Description of Artificial Sequence: Synthetic peptide
TAVYYCAKPHIVMVTAL

SEQ ID NO: 457 - protein, 13 aa, Artificial Sequence
  Description of Artificial Sequence: Synthetic peptide
YDDSDRPSGIPER

SEQ ID NO: 458 - protein, 5 aa, Artificial Sequence
  Description of Artificial Sequence: Synthetic peptide
FTFSY

SEQ ID NO: 459 - protein, 8 aa, Artificial Sequence
  Description of Artificial Sequence: Synthetic peptide
GSYWAFDY

SEQ ID NO: 460 - protein, 4 aa, Artificial Sequence
  Description of Artificial Sequence: Synthetic peptide
DNSD

SEQ ID NO: 461 - protein, 9 aa, Artificial Sequence
  Description of Artificial Sequence: Synthetic peptide
GNSITSDYA

SEQ ID NO: 462 - protein, 4 aa, Artificial Sequence
  Description of Artificial Sequence: Synthetic peptide
GFTF

SEQ ID NO: 463 - protein, 9 aa, Artificial Sequence
  Description of Artificial Sequence: Synthetic peptide
ARDQNYDIL

SEQ ID NO: 464 - protein, 5 aa, Artificial Sequence
  Description of Artificial Sequence: Synthetic peptide
VTPNF

SEQ ID NO: 465 - protein, 9 aa, Artificial Sequence
  Description of Artificial Sequence: Synthetic peptide
YAASTLQSG

SEQ ID NO: 466 - protein, 7 aa, Artificial Sequence
  Description of Artificial Sequence: Synthetic peptide
ESGWSHY

SEQ ID NO: 467 - protein, 244 aa, Artificial Sequence
  Description of Artificial Sequence: Synthetic polypeptide
VPLIEGRIVGGWECEKHSQPWQVAVYSHGWAHCGGVLVHPQWVLTAAHCLKKNSQVWLGRHNLFEPEDTGQRVPVSHSFPHPLYNMSLLKHQSLRPDEDSSHDLMLLRLSEPAKITDVVKVLGLPTQEPALGTTCYASGWGSIEPEEFLRPRSLQCVSLHLLSNDMCARAYSEKVTEFMLCAGLWTGGKDTCGGDSGGPLVCNGVLQGITSWGPEPCALPEKPAVYTKVVHYRKWIKDTIAANP

SEQ ID NO: 468 - protein, 451 aa, Artificial Sequence
  Description of Artificial Sequence: Synthetic polypeptide
EVQLVESGGGLVQPGGSLRLSCAASGFTFSSYWMTWVRQPPGKGLEWVANIKQDGSERYFVDSVKGRFTISRDNAKNSLYLQMNSLRAEDTAVYYCARDQNYDILTGHYGMDVWGQGTTVTVSSASTKGPSVFPLAPCSRSTSESTAALGCLVKDYFPEPVTVSWNSGALTSGVHTFPAVLQSSGLYSLSSVVTVPSSSLGTKTYTCNVDHKPSNTKVDKRVESKYGPPCPPCPAPEAAGGPSVFLFPPKPKDTLMISRTPEVTCVVVDVSQEDPEVQFNWYVDGVEVHNAKTKPREEQFNSTYRVVSVLTVLHQDWLNGKEYKCKVSNKGLPSSIEKTISKAKGQPREPQVYTLPPSQEEMTKNQVSLTCLVKGFYPSDIAVEWESNGQPENNYKTTPPVLDSDGSFFLYSRLTVDKSRWQEGNVFSCSVMHEALHNHYTQKSLSLSLGK

SEQ ID NO: 469 - protein, 214 aa, Artificial Sequence
  Description of Artificial Sequence: Synthetic polypeptide
EIVLTQSPSFLSASVGDRVTITCRASQGISSYLSWYQQKPGKAPKLLIYATSTLQSGVPSRFSGSGSGTEFTLTISSLQPEDFATYYCQQLNSYPRTFGQGTKVEIKRTVAAPSVFIFPPSDEQLKSGTASVVCLLNNFYPREAKVQWKVDNALQSGNSQESVTEQDSKDSTYSLSSTLTLSKADYEKHKVYACEVTHQGLSSPVTKSFNRGEC

SEQ ID NO: 470 - protein, 7 aa, Artificial Sequence
  Description of Artificial Sequence: Synthetic peptide
DDSDRPS

SEQ ID NO: 471 - DNA, 1338 bp, Artificial Sequence
  Description of Artificial Sequence: Synthetic polynucleotide
gaggtgcagctggtggagagcggtggcggtctggtgaagccaggtggcagcctgcgcctgagctgtgccgccagcggtttcaccttcagccgctacaacatgaactgggtgcgccaagccccaggcaagggcctggagtgggtgagcagcatcagcaccagcagcaactacatctactacgccgacagcgtgaagggccgcttcaccttcagccgcgacaacgccaagaacagcctggacctgcagatgagcggtctgcgcgccgaggacaccgccatctactactgcacccgcggttggggcccattcgactactggggccagggcaccctggtgaccgtgagcagcgcctccaccaagggcccatcggtcttccccctggcaccctcctccaagagcacctctgggggcacagcggccctgggctgcctggtcaaggactacttccccgaaccggtgacggtgtcgtggaactcaggcgccctgaccagcggcgtgcacaccttcccggctgtcctacagtcctcaggactctactccctcagcagcgtggtgaccgtgccctccagcagcttgggcacccagacctacatctgcaacgtgaatcacaagcccagcaacaccaaggtggacaagaaagttgagcccaaatcttgtgacaaaactcacacatgtccaccgtgcccagcacctgaagcagcagggggaccgtcagtcttcctcttccccccaaaacccaaggacaccctcatgatctcccggacccctgaggtcacatgcgtggtggtgagcgtgagccacgaagaccctgaggtcaagttcaactggtacgtggacggcgtggaggtgcataatgccaagacaaagccgcgggaggagcagtacaacagcacgtaccgtgtggtcagcgtcctcaccgtcctgcaccaggactggctgaatggcaaggagtacaagtgcaaggtctccaacaaagccctcccagcccccatcgagaaaaccatctccaaagccaaagggcagccccgagaaccacaggtgtacgtgtaccccccatcccgggaggagatgaccaagaaccaggtcagcctgacctgcctggtcaaaggcttctatcccagcgacatcgccgtggagtgggagagcaatgggcagccggagaacaactacaagaccacgcctcccgtgctggactccgacggctccttcgccctcgtgagcaagctcaccgtggacaagtctagatggcagcaggggaacgtcttctcatgctccgtgatgcatgaggctctgcacaaccactacacgcagaagagcctctccctgtctccgggtaaa

SEQ ID NO: 472 - protein, 254 aa, Artificial Sequence
  KL2B997 HC
QVQLQESGPGLVKPSETLSLTCTVSGGSISSYYWSWIRQPPGKGLEWIGYIYYSGSTNYNPSLKSRVTISVDTSKNQFSLKLSSVTAADTAVYYCAGTTIFGVVTPNFYYGMDVWGQGTTVTVSSASTKGPSVFPLAPSSKSTSGGTAALGCLVKDYFPEPVTVSWNSGALTSGVHTFPAVLQSSGLYSLSSVVTVPSSSLGTQTYICNVNHKPSNTKVDKKVEPKSCDKTHTGSGSGSHHHHHHGSGLPETGG

SEQ ID NO: 473 - protein, 214 aa, Artificial Sequence; identical to SEQ ID NO: 221
  KL2B997 LC

SEQ ID NO: 474 - protein, 228 aa, Artificial Sequence
  KL2B1251 HC
QVQLQESGPGLVKPSETLSLTCTVSGGSISSYYWSWIRQPPGKGLEWIGYIYYSGSTNYNPSLKSRVTISVDTSKNQFSLKLSSVTAADTAVYYCAGTTIFGVVTPNFYYGMDVWGQGTTVTVSSASTKGPSVFPLAPSSKSTSGGTAALGCLVKDYFPEPVTVSWNSGALTSGVHTFPAVLQSSGLYSLSSVVTVPSSSLGTQTYICNVNHKPSNTKVDKKVEPKSC

SEQ ID NO: 475 - protein, 214 aa, Artificial Sequence; identical to SEQ ID NO: 221
  KL2B1251 LC
